(19) United States
(12) Patent Application Publication
(10) Pub. No.: US 2013/0303395 A1
(43) Pub. Date: Nov. 14, 2013

(54) MARKER SEQUENCES FOR SYSTEMIC LUPUS ERYTHEMATOSUS AND THE USE THEREOF

(71) Applicants: Angelika Lueking, Bochum (DE); Axel Kowald, Bochum (DE); Stefan Müllner, Langenfeld (DE); Christian Scheer, Dortmund (DE); Matthias Schneider, Dusseldorf (DE)

(72) Inventors: Angelika Lueking, Bochum (DE); Axel Kowald, Bochum (DE); Stefan Müllner, Langenfeld (DE); Christian Scheer, Dortmund (DE); Matthias Schneider, Dusseldorf (DE)

(73) Assignee: PROTAGEN AKTIENGESELLSCHAFT, DORTMUND (DE)

(21) Appl. No.: 13/879,149

(22) PCT Filed: Oct. 12, 2011
(86) PCT No.: PCT/EP11/67842

§ 371 Date: Jul. 31, 2013

(30) Foreign Application Priority Data
Oct. 12, 2010 (EP) 10187316.4

(51) Int. Cl. G01N 33/68

(52) U.S. Cl. CPC G01N 33/6854
USPC 506/9; 506/17

(57) ABSTRACT

The invention relates to novel marker sequences for systemic lupus erythematosus and to the use thereof in diagnosis as well as to a method for screening potential active ingredients for systemic lupus erythematosus diseases using said marker sequences. The invention further relates to a diagnostic device containing such marker sequences for systemic lupus erythematosus, especially to a protein biochip and the use thereof.

[0001] The present invention relates to novel marker sequences for systemic lupus erythematosus and to the use thereof in diagnosis, together with a method for screening potential active ingredients for systemic lupus erythematosus diseases by way of these marker sequences. The invention further relates to a diagnostic device comprising such marker sequences for systemic lupus erythematosus, in particular a protein biochip, and to the use thereof.

[0002] Protein biochips are gaining increasing industrial importance for analytical and diagnostic purposes as well as in pharmaceutical development. Protein biochips have also become established as screening tools.

[0003] To this end, the fast and highly parallel detection of a plurality of specifically binding analysis molecules during a single experiment is made possible. Producing protein biochips requires the availability of the necessary proteins. For this purpose, in particular protein expression libraries have become established. High throughput cloning of defined open reading frames is one option (Heyman, J. A., Cornthwaite, J., Foncerrada, L., Gilmore, J. R., Gontang, E., Hartman, K. J., Hernandez, C. L., Hood, R., Hull, H. M., Lee, W. Y., Marcil, R., Marsh, E. J., Mudd, K. M., Patino, M. J., Purcell, T. J., Rowland, J. J., Sindici, M. L. and Hoeffler, J. P. (1999) Genome-scale cloning and expression of individual open reading frames using topoisomerase mediated ligation. Genome Res, 9, 383-392; Kersten, B., Feilner, T., Kramer, A., Wehrmeyer, S., Possling, A., Witt, I., Zanor, M. I., Stracke, R., Lueking, A., Kreutzberger, J., Lehrach, H. and Cahill, D. J. (2003) Generation of Arabidopsis protein chip for antibody and serum screening. Plant Molecular Biology, 52, 999-1010; Reboul, J., Vaglio, P., Rual, J. F., Lamesch, P., Martinez, M., Armstrong, C. M., Li, S., Jacotot, L., Bertin, N., Janky, R., Moore, T., Hudson, J. R., Jr., Hartley, J. L., Brasch, M. A., Vandenhaute, J., Boulton, S., Endress, G. A., Jenna, S., Chevet, E., Papasotiropoulos, V., Tolias, P. P., Ptacek, J., Snyder, M., Huang, R., Chance, M. R., Lee, H., Doucette-Stamm, L., Hill, D. E. and Vidal, M. (2003) C. elegans ORFeome version 1.1: experimental verification of the genome annotation and resource for proteome-scale protein expression. Nat Genet, 34, 35-41.; Walhout, A. J., Temple, G. F., Brasch, M. A., Hartley, J. L., Lorson, M. A., van den Heuvel, S, and Vidal, M. (2000) GATEWAY recombinational cloning: application to the cloning of large numbers of open reading frames or ORFeomes. Methods Enzymol, 328, 575-592). However, such an approach is highly dependent on the progress of genome sequencing projects and the annotation of these gene sequences. Moreover, the determination of the expressed sequence can be ambiguous due to differential splicing processes. This problem can be circumvented by the use of cDNA expression libraries (Büssow, K., Cahill, D., Nietfeld, W., Bancroft, D., Scherzinger, E., Lehrach, H. and Walter, G. (1998) A method for global protein expression and antibody screening on high-density filters of an arrayed cDNA library. Nucleic Acids Research, 26, 5007-5008; Büssow, Nordhoff, E., Lübbert, C., Lehrach, H. and Walter, G. (2000) A human cDNA library for high-throughput protein expression screening. Genomics, 65, 1-8; Holz, C., Lueking, A., Bovekamp, L., Gutjahr, C., Bolotina, N., Lehrach, H. and Cahill, D. J. (2001) A human cDNA expression library in yeast enriched for open reading frames. Genome Res, 11, 1730-1735; Lueking, A., Holz, C., Gotthold, C., Lehrach, H. and Cahill, D. (2000) A system for dual protein expression in Pichia pastoris and Escherichia coli, Protein Expr, Purif., 20, 372-378). To this end, the cDNA of a particular tissue is cloned into a bacterial or eukaryotic expression vector, such as yeast. The vectors used for expression are generally characterized in that these carry inducible promoters, by way of which the time of protein expression can be controlled. In addition, expression vectors comprise sequences for so-called affinity epitopes or affinity proteins, which permit the specific detection of recombinant fusion proteins by way of an antibody that is directed against the affinity epitope and additionally enable specific purification by way of affinity chromatography (IMAC).

[0004] For example, the gene products of a cDNA expression library from human fetal brain tissue in the bacterial expression system Escherichia coli were arranged in a high-density format on a membrane and able to be successfully screened with various antibodies. It was shown that the proportion of full-length proteins was at least 66%. It was further possible to express the recombinant proteins from expression libraries in high throughput and purify them (Braun P., Hu, Y., Shen, B., Halleck, A., Koundinya, M., Harlow, E. and LaBaer, J. (2002) Proteome-scale purification of human proteins from bacteria. Proc Natl Acad Sci USA, 99, 2654-2659; Buessow (2000) supra; Lueking, A., Horn, M., Eickhoff, H., Buessow, K., Lehrach, H. and Walter, G. (1999) Protein microarrays for gene expression and antibody screening. Analytical Biochemistry, 270, 103-111). Such cDNA expression library-based protein biochips are the subject matter in particular of WO 99/57311 and WO 99/57312. In addition to antigen-presenting protein biochips, antibody-presenting arrangements are described (Lal et al (2002) Antibody arrays: An embryonic but rapidly growing technology, DDT, 7, 143-149; Kusnezow et al. (2003), Antibody microarrays: An evaluation of production parameters, Proteomics, 3, 254-264).

[0005] However, there is a high need to make indication-specific diagnostic devices, such as a protein biochip, available.

[0006] The object of the present invention is to provide improved marker sequences and the diagnostic use thereof for treating systemic lupus erythematosus.

[0007] The provision of specific marker sequences allows a reliable diagnosis and stratification of patients with systemic lupus erythematosus, in particular by way of a protein biochip.

[0008] The invention therefore relates to the use of marker sequences for diagnosing systemic lupus erythematosus, wherein at least one marker sequence of a cDNA selected from the group SEQ 1-716, or a respective protein coding therefor, or a respective partial sequence or fragment thereof (hereinafter: marker sequences according to the invention) is determined on or from a patient to be examined.

[0009] It was possible to identify the marker sequences according to the invention by way of differential screening of samples, specifically from healthy participants, with samples from patients with systemic lupus erythematosus.

[0010] For the first time, these marker sequences according to the invention were identified by way of protein chips (see examples).

[0011] The term “systemic lupus erythematosus (SLE)” relates a systemtic autoimmune disease from the collagenosis group. A particular characteristic of SLE (systemic lupus erythematosus) is the so-called butterfly rash.

[0012] Criteria for diagnosis are:

1. Butterfly rash
2. Discoid skin changes
3. Sensitivity to light
4. Mucous membrane ulcers (generally painless)
5. Arthritis in at least two joints
6. Serositis (pleurisy or pericarditis)
7. Kidney involvement (proteinuria <0.5 g/d or cylinder)
8. CNS involvement (seizures or psychosis)
9. Hematological findings (hemolytic anemia, leucopenia or thrombopenia)
10. Immunological findings: anti-dsDNA antibodies, anti-Sm antibodies, anticardiolipin antibodies;
11. Antinuclear antibodies without taking lupus erythematosus-triggering medication;

[0013] Evaluation: With four (three) positive findings, the diagnosis is considered reliable (likely) (definition e.g. according to Pschyrembel, de Gruyter, 261^{st} edition (2007), Berlin).

[0014] It is essential for the invention that the samples are not taken from conventional blood banks, but were carefully selected from SLE patients who are HIV and HCV negative, for example, and were tested in particular for infectious diseases. The complex sample selection procedure allows, for example, sufficient advantageous differentiation from diseases with symptoms similar to SME.False positive results are thus excluded, also because of the strict bioinformational evaluation (see examples).

[0015] The protein biochips are additionally produced by normalizing at least 1,000, preferably 2,000 different, or more, autoantigens of humans, which are not indication-specific of systemic lupus erythematosus. For example, such autoantigens can be obtained from other bodily fluids of patients with other illnesses such as pancreatic cancer, rheumatoid arthritis, prostate and the like.

[0016] The invention therefore also relates to such indication-specific protein biochips according to the invention for diagnosing systemic lupus erythematosus, wherein in a further verification step, the proteins represented on the protein biochip are normalized with autoantibodies from non-systemic lupus erythematosus patients and false positive proteins can be eliminated in this way.

[0017] Hereafter, a protein biochip thus produced is referred to as a “normalized protein biochip”. Such a normalized protein biochip has been found to be particularly advantageous for identifying specific marker sequences according to the invention because other similar autoimmune-relevant marker sequences can be excluded. This is contrary to the teaching of WO2003/090694.

[0018] This procedure likewise allows autoantibodies with a positive response to E. coli to be excluded. This is a further qualitative improvement, for example because autoantibodies that are directed to E. coli enterobacteria in humans can be excluded. As a result, new marker sequences can advantageously be identified with an improved signal-to-noise ratio.

[0019] In a further preferred embodiment, at least 2 to 5 or 10, preferably 30 to 50 marker sequences, or 50 to 100 or more marker sequences are thus determined on or from a patient to be examined.

[0020] In a further embodiment of the invention, the marker sequences according to the invention can also be combined, supplemented or expanded with known biomarkers for this indication.

[0021] In a preferred embodiment, the marker sequences are determined outside the human body and the determination is carried out in an ex vivo/in vitro diagnosis.

[0022] In a further embodiment of the invention, the invention relates to the use of marker sequences as diagnostic products, wherein at least one marker sequence of a cDNA is selected from the group SEQ 1-716, or a respective protein coding therefor, or a respective partial sequence or fragment thereof.

[0023] The invention further relates to a method for diagnosing systemic lupus erythematosus, wherein a.) at least one marker sequence of a cDNA selected from the group SEQ 1-716, or a protein coding therefor, or a respective partial sequence or fragment thereof, is applied to a solid support, and b.) brought in contact with body fluid or tissue extract and c.) the detection of an interaction of the body fluid or tissue extract with the marker sequences from a.) is carried out.

[0024] The invention therefore also relates to diagnostic products for diagnosing systemic lupus erythematosus, each selected from the group SEQ 1-716, or a respective protein coding therefor, or a respective partial sequence or fragment thereof.

[0025] Such an interaction can be detected by a probe, in particular by an antibody, for example.

[0026] The invention therefore also relates to the problem of providing a diagnostic device or an array, in particular a protein biochip, which allows a diagnosis of or examination for systemic lupus erythematosus.

[0027] The invention further relates to a method for the stratification, in particular for the risk stratification, and/or treatment management of a patient with systemic lupus erythematosus, wherein at least one marker sequence of a cDNA selected from the group SEQ 1-716, or a respective protein coding therefor, is determined on a patient to be examined.

[0028] The invention further encompasses the stratification of patients with systemic lupus erythematosus into new or established sub-groups of systemic lupus erythematosus as well as the expedient selection of patient groups for the clinical development of new therapeutic agents. The term treatment management also includes dividing the patients into responders and non-responders with respect to a treatment or the treatment course thereof.

[0029] The term “diagnosis” within the meaning of the present invention denotes the positive identification of systemic lupus erythematosus by way of the marker sequences according to the invention and the association of patients with the systemic lupus erythematosus disease. The term ‘diagnosis’ comprises medical diagnostics and examinations in this regard, in particular in vitro diagnostics and laboratory diagnostics, as well as proteomics and nucleic acid blotting. Additional examinations may be required for validation and to exclude other illnesses. The term ‘diagnosis’ therefore likewise encompasses the differential diagnosis of systemic lupus erythematosus by way of the marker sequences according to the invention and the prognosis of systemic lupus erythematosus.

[0030] “Stratifying (also: stratification) or treatment management” within the meaning of the present invention shall mean that the method according to the invention allows decisions regarding the treatment and therapy of the patient, be it hospitalization of the patent, use, effect and/or dosage of one or more pharmaceuticals, a therapeutic measure or monitoring the progression of an illness or treatment, or etiology or classification of a disease, for example into a new or existing sub-type, or the differentiation of illnesses and the patients thereof.

[0031] In a further embodiment of the invention, the term “stratification” comprises in particular risk stratification with the prognosis of an outcome of a disadvantageous health event.

[0032] Within the scope of the present invention, the term “patient” is considered to mean any participant—human or mammal—with the proviso that the participant is examined for systemic lupus erythematosus.

[0033] The term “marker sequences” within the meaning of the present invention shall mean that the cDNA, or the respective polypeptide or protein obtainable therefrom, is significant for systemic lupus erythematosus. For example, the cDNA, or the respective polypeptide or protein obtainable therefrom, can exhibit an interaction with substances from the body fluid or tissue extract of a patient with systemic lupus erythematosus (for example antigen (epitope)/antibody (paratope) interaction). Within the meaning of the invention, “wherein at least one marker sequence of a cDNA selected from the group SEQ 1-716, or a respective protein coding therefor, or a respective partial sequence or fragment thereof, is determined on or from a patient to be examined” shall mean that an interaction between the body fluid or tissue extract of a patient and the marker sequences according to the invention is detected. Such an interaction includes, for example, a bond, in particular a binding substance on at least one marker sequence according to the invention or, in the case of cDNA, hybridization with a suitable substance under select conditions, in particular stringent conditions (for example as customarily defined in J. Sambrook, E. F. Fritsch, T. Maniatis (1989), Molecular cloning: A laboratory manual, 2nd Edition, Cold Spring Habor Laboratory Press, Cold Spring Habor, USA or Ausubel, “Current Protocols in Molecular Biology”, Green Publishing Associates and Wiley Interscience, N.Y. (1989)). One example of stringent hybridization conditions is: hybridization in 4×SSC at 65° C. (alternatively in 50% formamide and 4×SSC at 42° C.), followed by several washing steps in 0.1×SSC at 65° C. for a total of approximately one hour. One example of less stringent hybridization conditions is hybridization in 4s SCC at 37° C., followed by several washing steps in 1×SCC at room temperature.

[0034] According to the invention, such substances are constituents of a body fluid, in particular blood, whole blood, blood plasma, serum, patient serum, urine, cerebrospinal fluid, synovial fluid or a tissue extract of the patient.

[0035] In a further embodiment of the invention, however, the marker sequences according to the invention can be present in a significantly higher or lower expression rate or concentration, indicating systemic lupus erythematosus. To this end, the relative sick/healthy expression rates of the marker sequences for systemic lupus erythematosus according to the invention can be determined by way of proteomics or nucleic acid blotting.

[0036] In a further embodiment of the invention, the marker sequences comprise a detection signal that is addressed to the substance to be bound (for example antibody, nucleic acid). According to the invention, the detection signal is preferably an epitope and/or paratope and/or haptene for a protein, and it is a hybridization region or binding region for a cDNA.

[0037] The marker sequences according to the invention are likewise listed in Table A and can be unambiguously identified by the respective cited database entry (also via the Internet: http://www.ncbi.nlm.nih.gov/) (see in Table A: Accession No. there), see also the associated sequence protocol.

[0038] The invention thus likewise relates to full-length sequences of the markers according to the invention, more particularly as defined in Table 1 by way of the known database entry, hereafter referred to as SEQ 1a-716a (cDNA).

[0039] The invention therefore also comprises embodiments of SEQ 1a-716a that are analogous to the marker sequences SEQ 1-716, as described in the claims for example, because the SEQ 1-716 according to the invention again represent partial sequences, at least with high homology. However, the specific marker sequences SEQ 1-716 are preferred according to the invention.

[0040] According to the invention, the marker sequences also comprise modifications of the cDNA sequence, and of the corresponding amino acid sequence, such as chemical modification, for example citrullination, acetylation, phosphorylation, glycosylation or polyA tail and other relevant modifications known to a person skilled in the art.

[0041] Another embodiment of the invention also encompasses partial sequences or fragments of the marker sequences according to the invention. These are in particular partial sequences that are 95%, 90%, notably 80% or 70% identical to the marker sequences according to the invention.

[0042] Partial sequences also include sequences that comprise 50 to 100 nucleotides, 70 to 120 nucleotides of a sequence of SEQ 1-716, or peptides obtainable therefrom.

[0043] “Partial sequences or fragments” of the marker sequences according to the invention are functionally defined and comprise sequences that have the same diagnostic function according to the invention.

[0044] In a further embodiment, the respective marker sequence may be represented in differing quantities in one or more regions on a solid support. This allows the sensitivity to be varied. The regions can each comprise a collectivity of marker sequences, which is to say a sufficient number of different marker sequences, in particular 2 to 5, or 10 or more, and optionally additional nucleic acids and/or proteins, in particular biomarkers. However, at least 96 to 25,000 (numerical) or more different or identical marker sequences and additional nucleic acids and/or proteins, in particular biomarkers, are preferred. Further preferred are more than 2,500, particularly preferred are 10,000 or more different or identical marker sequences and optionally additional nucleic acids and/or proteins, in particular biomarkers.

[0045] Another object of the invention is an arrangement of marker sequences comprising at least one marker sequence of a cDNA selected from the group SEQ 1-716, or a respective protein coding therefor. The arrangement preferably comprises at least 2 to 5 or 10, preferably 30 to 50 marker sequences, or 50 to 100 or more marker sequences.

[0046] Within the scope of the present invention, “arrangement” shall be synonymous with “array”, and provided that this “array” is used to identify substances on marker sequences, this shall be understood to mean an “assay” or a diagnostic device. In a preferred embodiment, the arrangement is designed so that the marker sequences represented on the arrangement are present in the form of a grid on a solid support. Moreover, arrangements that allow a high-density arrangement of protein binders and where the marker sequences are spotted are preferred. Such high-density spotted arrangements are disclosed in WO 99/57311 and WO 99/57312, for example, and can advantageously be employed in a robot-assisted automated high-throughput method.

[0047] However, within the scope of the present invention the term “assay” or diagnostic device also comprises embodiments of a device, such as ELISA, bead-based assay, line assay, western blot, immunochromatographic methods (for example so-called lateral flow immunoassays) or similar immunological single or multiplex detection methods. A protein biochip within the meaning of the present invention is a systematic arrangement of proteins on a solid support.

[0048] The marker sequences of the arrangement are fixed on a solid support, however preferably they are spotted or immobilized, even printed on, which is to say they are applied reproducibly. One or more marker sequences can be present multiple times in the collectivity of all marker sequences and be present in differing quantities relative to a spot. Furthermore, the marker sequences can be standardized on the solid support (for example by way of human globulin serial dilution series as internal calibrators for data normalization and quantitative evaluation).

[0049] As a result, the invention also relates to an assay or a protein biochip comprising an arrangement containing marker sequences according to the invention.

[0050] In a further embodiment, the marker sequences are present in the form of clones. For example, such clones can be obtained by way of a cDNA expression library according to the invention (Büssow et al. 1998 (supra)). In a preferred embodiment, such expression libraries containing clones are obtained by way of expression vectors from an expressing cDNA library comprising the cDNA marker sequences. These expression vectors preferably comprise inducible promoters. The expression can, for example, be induced by way of an inducer such as IPTG. Suitable expression vectors are described in Terpe et al. (Terpe T Appl Microbiol Biotechnol. 2003 January; 60(5):523-33).

[0051] Expression libraries are known to a person skilled in the art and can be produced according to standard reference books such as Sambrook et al, “Molecular Cloning, A laboratory handbook, 2nd edition (1989), CSH press, Cold Spring Harbor, N.Y. Also preferred are expression libraries that are tissue-specific (for example human tissue, in particular human organs). According to the invention, expression libraries that can be obtained by way of exon trapping are also covered. The term ‘expression bank’ can be employed synonymously for the term expression library.

[0052] Also preferred are protein biochips or corresponding expression libraries that have no redundancy (so-called: Uniclone® library) and that can be produced according to the teachings of WO 99/57311 and WO 99/57312, for example. These preferred Uniclone libraries have a high proportion of non-defective fully expressed proteins of a cDNA expression library.

[0053] Within the scope of the present invention, the clones can also be, but are not limited to, transformed bacteria, recombinant phages or transformed cells from mammals, insects, fungi, yeast or plants.

[0054] The clones are fixed, spotted or immobilized on a solid support.

[0055] The invention thus relates to an arrangement, wherein the marker sequences are present in the form of clones.

[0056] The marker sequences can also be present in the form of a fusion protein comprising at least one affinity epitope or “tag”, for example. The tag may be one such as c-myc, his tag, arg tag, FLAG, alkaline phosphatase, V5 tag, T7 tag or strep tag, HAT tag, NusA, S tag, SBP tag, thioredoxin, DsbA, including a fusion protein, preferably a cellulose-binding domain, green fluorescent protein, maltose-binding protein, calmodulin-binding protein, glutathione S-transferase or lacZ.

[0057] In all embodiments, the term “solid support” encompasses designs such as a filter, a membrane, a magnetic or fluorophore-labeled bead, a silicon wafer, glass, metal, plastic material, a chip, a mass spectrometry target or a matrix. However, a filter is preferred according to the invention.

[0058] Moreover, PVDF, nitrocellulose or nylon are preferred filters (for example Immobilon P Millipore, Protran Whatman, Hybond N+Amersham).

[0059] In a further preferred embodiment of the arrangement according to the invention, this arrangement corresponds to a grid having the size of a microtiter plate (8-12 wells, 96 wells, 384 wells or more), a silicon wafer, a chip, a mass spectrometry target or a matrix.

[0060] In a further embodiment, the invention relates to an assay or protein biochip for identifying and characterizing a substance for systemic lupus erythematosus, characterized in that an arrangement or assay according to the invention a.) is brought in contact with at least one substance to be analyzed and b.) successful binding is detected.

[0061] The invention further relates to a method for identifying and characterizing a substance for systemic lupus erythematosus, characterized in that an arrangement or assay according to the invention a.) is brought in contact with at least one substance to be analyzed and b.) successful binding is detected.

[0062] The substance to be analyzed can be any arbitrary native or non-native biomolecule, a synthetic chemical molecule, a mixture, or a substance library.

[0063] After the substance to be analyzed has come in contact with a marker sequence, the successful binding process is evaluated, which takes place, for example, using commercially available image analysis software (GenePix Pro (Axon Laboratores), Aida (Raytest), ScanArray (Packard Bioscience)).

[0064] The protein-protein interactions according to the invention (for example protein on marker sequence, such as antigen/antibody) or corresponding “means for detecting successful binding” can be visualized, for example, in the customary manner by way of fluorescent labeling, biotinylation, radioisotope labeling or colloidal gold or latex particle labeling. Bound antibodies are detected with the aid of secondary antibodies labeled with commercially available reporter molecules (for example Cy, Alexa, Dyomics, FITC or similar fluorescent dyes, colloidal gold or latex particles), or with reporter enzymes, such as alkaline phosphatase, horseradish peroxidase, or the like, and the corresponding colorimetric, fluorescent or chemiluminescent substrates. Readout is carried out, for example, by way of a microarray laser scanner, a CCD camera or visually.

[0065] In a further embodiment, the invention relates to a pharmaceutical/active ingredient or prodrug developed for systemic lupus erythematosus and obtainable through the use of the assay or protein biochip according to the invention.

[0066] The invention therefore likewise relates to the use of an arrangement according to the invention or an assay for screening active ingredients for systemic lupus erythematosus.

[0067] In a further embodiment, the invention therefore likewise relates to a target for the treatment and therapy of systemic lupus erythematosus, selected in each case from the group SEQ 1-716 or a protein coding therefor.

[0068] In a further embodiment, the invention likewise relates to the use of the marker sequences according to the invention, preferably in the form of an arrangement as an affinity material for carrying out apheresis or, in the broader sense, dialysis, wherein substances from body fluids of a patient with systemic lupus erythematosus, such as blood or plasma, bind to the marker sequences according to the invention and consequently can be selectively withdrawn from the body fluid.

### EXAMPLES AND FIGURES

[0069] Ten or more patient samples were individually screened against a cDNA expression library. The systemic lupus erythematosus-specific expression clones were determined by way of comparison to ten or more healthy samples. The identity of the marker sequences was determined by way of DNA sequencing.

[0070] FIG. 1 shows the differential screening between two protein biochips from a cDNA expression library of a patient and a healthy participant, respectively. The differential clones are detected by way of fluorescent labeling and evaluated by way of bioinformatics.

[0071] Within the scope of the biomarker identification, various bioinformatics analyses are carried out. Reactivities against approximately 2000 different antigens are measured for each serum using microarrays. This data is used to rank the spotted antigens with respect to the differentiation capability thereof between healthy and diseased sera. This evaluation is carried out by way of the non-parametric Mann-Whitney tests using normalized intensity data. An internal standard, which is also spotted on each chip, is used for normalization purposes. Because a p-value is calculated for each antigen, methods for correcting multiple testing are employed. A very conservative approach that is taken is to carry out a Bonferroni correction, and additionally the less restrictive false discovery rate (FDR) according to Benjamini & Hochberg is calculated.

[0072] Additionally, the data is utilized to classify the sera. To this end, different multivariate methods are employed. These are methods selected from statistical learning methods such as support vector machines (SVM), neuronal networks or classification trees, as well as a threshold value method, which is suitable both for classifying and for visually representing the data.

[0073] So as to avoid overfitting, tenfold cross validation of the data is carried out.

TABLE A
(gi accession number valid as of Oct. 1, 2010)

| SEQ 1a-716a | Name |
|---|---|
| gi\|66932947 | alpha-2-macroglobulin precursor [Homo sapiens] |
| gi\|55743075 | angio-associated, migratory cell protein [Homo sapiens] |
| gi\|45446740 | ATP-binding cassette, sub-family A, member 2 isoform a [Homo sapiens] |
| gi\|21536349 | amiloride-sensitive cation channel 2, neuronal isoform b [Homo sapiens] |
| gi\|4501867 | aconitase 2 precursor [Homo sapiens] |
| gi\|4501885 | beta actin [Homo sapiens] |
| gi\|4501887 | actin, gamma 1 propeptide [Homo sapiens] |
| gi\|29826323 | adducin 1 (alpha) isoform c [Homo sapiens] |
| gi\|194353970 | alpha-2A-adrenergic receptor [Homo sapiens] |
| gi\|148539876 | beta adrenergic receptor kinase 1 [Homo sapiens] |
| gi\|4501989 | alpha-fetoprotein precursor [Homo sapiens] |
| gi\|156523970 | alpha-2-HS-glycoprotein [Homo sapiens] |
| gi\|4502027 | albumin preproprotein [Homo sapiens] |
| gi\|4557305 | aldolase A [Homo sapiens] |
| gi\|32967601 | ankyrin 3 isoform 1 [Homo sapiens] |
| gi\|55749577 | solute carrier family 25 (mitochondrial carrier; adenine nucleotide translocator), |
| | member 4 [Homo sapiens] |
| gi\|156071459 | solute carrier family 25, member 5 [Homo sapiens] |
| gi\|156071462 | solute carrier family 25, member A6 [Homo sapiens] |
| gi\|4502131 | amyloid beta A4 precursor protein-binding, family B, member 1 isoform E9 [Homo |
| | sapiens] |
| gi\|4885065 | amyloid precursor-like protein 1 isoform 2 precursor [Homo sapiens] |
| gi\|4502201 | ADP-ribosylation factor 1 [Homo sapiens] |
| gi\|4502209 | ADP-ribosylation factor 5 [Homo sapiens] |
| gi\|33469974 | activating transcription factor 4 [Homo sapiens] |
| gi\|49574491 | Na+/K+-ATPase beta 2 subunit [Homo sapiens] |
| gi\|4757810 | ATP synthase, H+ transporting, mitochondrial F1 complex, alpha subunit precursor |
| | [Homo sapiens] |
| gi\|32189394 | ATP synthase, H+ transporting, mitochondrial F1 complex, beta subunit precursor |
| | [Homo sapiens] |
| gi\|50593533 | ATP synthase, H+ transporting, mitochondrial F0 complex, subunit C2 isoform a |
| | precursor [Homo sapiens] |
| gi\|4502313 | ATPase, H+ transporting, lysosomal, V0 subunit c [Homo sapiens] |
| gi\|20336205 | transcriptional regulator ATRX isoform 2 [Homo sapiens] |
| gi\|4502337 | alpha-2-glycoprotein 1, zinc [Homo sapiens] |
| gi\|115387099 | brain-specific angiogenesis inhibitor 2 [Homo sapiens] |
| gi\|178557739 | complement component 4B preproprotein [Homo sapiens] |
| gi\|8393009 | chromosome 11 open reading frame2 [Homo sapiens] |
| gi\|40804468 | calcium channel, voltage-dependent, beta 1 subunit isoform 1 [Homo sapiens] |
| gi\|4502549 | calmodulin 2 [Homo sapiens] |
| gi\|4502565 | calpain, small subunit 1 [Homo sapiens] |
| gi\|4502679 | CD63 antigen isoform A [Homo sapiens] |
| gi\|10835071 | CD74 antigen isoform b [Homo sapiens] |
| gi\|119627240 | cyclin-dependent kinase inhibitor 2C (p18, inhibits CDK4), isoform CRA_b [Homo |
| | sapiens] |
| gi\|56786147 | cysteine dioxygenase, type I [Homo sapiens] |
| gi\|169636439 | cholesteryl ester transfer protein, plasma precursor [Homo sapiens] |
| gi\|5031635 | cofilin 1 (non-muscle) [Homo sapiens] |
| gi\|4502805 | chromogranin A precursor [Homo sapiens] |
| gi\|6978649 | choline kinase beta isoform a [Homo sapiens] |
| gi\|21536286 | brain creatine kinase [Homo sapiens] |
| gi\|4502847 | cold inducible RNA binding protein [Homo sapiens] |
| gi\|14917109 | adaptor-related protein complex 2, mu 1 subunit isoform a [Homo sapiens] |
| gi\|4557471 | adaptor-related protein complex 1, sigma 1 subunit [Homo sapiens] |
| gi\|41872374 | polo-like kinase 3 [Homo sapiens] |
| gi\|4502981 | cytochrome c oxidase subunit IV isoform 1 precursor [Homo sapiens] |
| gi\|4503049 | cysteine-rich protein 2 [Homo sapiens] |
| gi\|4503051 | collapsin response mediator protein 1 isoform 2 [Homo sapiens] |
| gi\|4503065 | crystallin, mu isoform 1 [Homo sapiens] |
| gi\|4503101 | cysteine and glycine-rich protein 2 [Homo sapiens] |
| gi\|4503107 | cystatin C precursor [Homo sapiens] |
| gi\|4503139 | cathepsin B preproprotein [Homo sapiens] |
| gi\|4503211 | cytochrome P450, family 27, subfamily A, polypeptide 1 precursor [Homo sapiens] |
| gi\|18426915 | drebrin 1 isoform a [Homo sapiens] |
| gi\|62530384 | dodecenoyl-Coenzyme A delta isomerase precursor [Homo sapiens] |
| gi\|56682959 | dynactin 1 isoform 1 [Homo sapiens] |
| gi\|4758138 | DEAD (Asp-Glu-Ala-Asp) box polypeptide 5 [Homo sapiens] |
| gi\|193783649 | unnamed protein product [Homo sapiens] |
| gi\|42544174 | deoxythymidylate kinase (thymidylate kinase) [Homo sapiens] |
| gi\|4503471 | eukaryotic translation elongation factor 1 alpha 1 [Homo sapiens] |
| gi\|4503475 | eukaryotic translation elongation factor 1 alpha 2 [Homo sapiens] |
| gi\|4503477 | eukaryotic translation elongation factor 1 beta 2 [Homo sapiens] |
| gi\|4503481 | eukaryotic translation elongation factor 1 gamma [Homo sapiens] |
| gi\|4503483 | eukaryotic translation elongation factor 2 [Homo sapiens] |
| gi\|4826708 | ephrin A3 [Homo sapiens] |
| gi\|110347457 | EGF-like-domain, multiple 3 [Homo sapiens] |
| gi\|4503529 | eukaryotic translation initiation factor 4A isoform 1 [Homo sapiens] |
| gi\|49355765 | ELAV-like protein 3 isoform 2 [Homo sapiens] |
| gi\|4503571 | enolase 1 [Homo sapiens] |
| gi\|4758272 | endosulfine alpha isoform 3 [Homo sapiens] |
| gi\|166362737 | erythrocyte membrane protein band 4.2 isoform 2 [Homo sapiens] |
| gi\|194097332 | ephrin receptor EphB6 precursor [Homo sapiens] |
| gi\|4503599 | excision repair cross-complementing 1 isofrom 2 [Homo sapiens] |
| gi\|46370066 | exostosin 1 [Homo sapiens] |
| gi\|27886588 | PTK2B protein tyrosine kinase 2 beta isoform b [Homo sapiens] |
| gi\|41872631 | fatty acid synthase [Homo sapiens] |
| gi\|4503659 | ubiquitin-like protein fubi and ribosomal protein S30 precursor [Homo sapiens] |
| gi\|67089147 | farnesyl-diphosphate farnesyltransferase 1 [Homo sapiens] |
| gi\|209571584 | farnesyl diphosphate synthase isoform b [Homo sapiens] |
| gi\|4758356 | flap structure-specific endonuclease 1 [Homo sapiens] |
| gi\|213417614 | fibroblast growth factor 13 isoform 3 [Homo sapiens] |
| gi\|4503711 | fibroblast growth factor receptor 3 isoform 1 precursor [Homo sapiens] |
| gi\|4503727 | FK506 binding protein 3, 25 kDa [Homo sapiens] |
| gi\|116829964 | KiSS-1 metastasis-suppressor [Homo sapiens] |
| gi\|194306559 | kinesin light chain 1 isoform 3 [Homo sapiens] |
| gi\|9845502 | ribosomal protein SA [Homo sapiens] |
| gi\|5031851 | stathmin 1 [Homo sapiens] |
| gi\|4557032 | L-lactate dehydrogenase B [Homo sapiens] |
| gi\|5031877 | lamin B1 [Homo sapiens] |
| gi\|167555125 | low density lipoprotein receptor-related protein 3 [Homo sapiens] |
| gi\|153945728 | microtubule-associated protein 1B [Homo sapiens] |
| gi\|8400715 | microtubule-associated protein tau isoform 4 [Homo sapiens] |
| gi\|14043022 | methionyl-tRNA synthetase [Homo sapiens] |
| gi\|110347461 | MYC-associated zinc finger protein isoform 1 [Homo sapiens] |
| gi\|6631095 | minichromosome maintenance complex component 3 [Homo sapiens] |
| gi\|23510448 | minichromosome maintenance complex component 5 [Homo sapiens] |
| gi\|5031905 | MyoD family inhibitor [Homo sapiens] |
| gi\|84311247 | mutant truncated midkine B [Homo sapiens] |
| gi\|57222568 | myeloid/lymphoid or mixed-lineage leukemia (trithorax homolog, Drosophila); |
| | translocated to, 6 [Homo sapiens] |
| gi\|61835204 | mercaptopyruvate sulfurtransferase isoform 2 [Homo sapiens] |
| gi\|4505289 | diphosphomevalonate decarboxylase [Homo sapiens] |
| gi\|17986258 | myosin, light chain 6, alkali, smooth muscle and non-muscle isoform 1 [Homo sapiens] |
| gi\|154354979 | myosin X [Homo sapiens] |
| gi\|5174607 | NGFI-A binding protein 2 [Homo sapiens] |
| gi\|5031931 | nascent polypeptide-associated complex alpha subunit isoform b [Homo sapiens] |
| gi\|157412270 | heterogeneous nuclear ribonucleoprotein M isoform b [Homo sapiens] |
| gi\|4557789 | norrin [Homo sapiens] |
| gi\|4758768 | NADH dehydrogenase (ubiquinone) 1 alpha subcomplex, 10, 42 kDa precursor [Homo |
| | sapiens] |
| gi\|4758774 | NADH dehydrogenase (ubiquinone) 1 beta subcomplex, 10, 22 kDa [Homo sapiens] |
| gi\|20149568 | NADH dehydrogenase (ubiquinone) flavoprotein 1, 51 kDa precursor [Homo sapiens] |
| gi\|98986461 | neurogenic differentiation 2 [Homo sapiens] |
| gi\|187608777 | NF-kappa-B inhibitor-like protein 2 [Homo sapiens] |
| gi\|119596463 | neuronatin, isoform CRA_a [Homo sapiens] |
| gi\|4505409 | non-metastatic cells 2, protein (NM23B) expressed in [Homo sapiens] |
| gi\|10835063 | nucleophosmin 1 isoform 1 [Homo sapiens] |
| gi\|34098946 | nuclease sensitive element binding protein 1 [Homo sapiens] |
| gi\|71361682 | nuclear mitotic apparatus protein 1 [Homo sapiens] |
| gi\|9845505 | ornithine decarboxylase antizyme 1 [Homo sapiens] |
| gi\|38372882 | RecName: Full = Mitochondrial inner membrane protein OXA1L; AltName: |
| | Full = Oxidase assembly 1-like protein; Short = OXA1-like protein; AltName: |
| | Full = OXA1Hs; AltName: Full = Hsa; Flags: Precursor |
| gi\|20070125 | prolyl 4-hydroxylase, beta subunit precursor [Homo sapiens] |
| gi\|124494254 | ErbB3-binding protein 1 [Homo sapiens] |
| gi\|4505621 | prostatic binding protein [Homo sapiens] |
| gi\|4505591 | peroxiredoxin 1 [Homo sapiens] |
| gi\|93141029 | paralemmin isoform 2 [Homo sapiens] |
| gi\|106049292 | pyruvate carboxylase precursor [Homo sapiens] |
| gi\|134019487 | chromatin modifying protein 1A isoform 1 [Homo sapiens] |
| gi\|4505685 | pyruvate dehydrogenase (lipoamide) alpha 1 precursor [Homo sapiens] |
| gi\|22202633 | prefoldin subunit 5 isoform alpha [Homo sapiens] |
| gi\|11321601 | phosphofructokinase, platelet [Homo sapiens] |
| gi\|16753215 | profilin 2 isoform a [Homo sapiens] |
| gi\|4505753 | phosphoglycerate mutase 1 (brain) [Homo sapiens] |
| gi\|20149543 | placental growth factor, vascular endothelial growth factor-related protein [Homo |
| | sapiens] |
| gi\|5453898 | protein (peptidyl-prolyl cis/trans isomerase) NIMA-interacting 1 [Homo sapiens] |
| gi\|205360954 | polycystin 1 isoform 1 precursor [Homo sapiens] |
| gi\|33286420 | pyruvate kinase, muscle isoform M1 [Homo sapiens] |
| gi\|33598948 | phospholipase C gamma 1 isoform a [Homo sapiens] |
| gi\|9945439 | septin 5 [Homo sapiens] |
| gi\|156616275 | polymerase (DNA directed), delta 1, catalytic subunit 125 kDa [Homo sapiens] |
| gi\|110618253 | mitochondrial DNA-directed RNA polymerase precursor [Homo sapiens] |
| gi\|127139033 | cytochrome P450 reductase [Homo sapiens] |
| gi\|10863927 | peptidylprolyl isomerase A [Homo sapiens] |
| gi\|4758950 | peptidylprolyl isomerase B precursor [Homo sapiens] |
| gi\|4826932 | peptidylprolyl isomerase D [Homo sapiens] |
| gi\|4506003 | protein phosphatase 1, catalytic subunit, alpha isoform 1 [Homo sapiens] |
| gi\|21361399 | alpha isoform of regulatory subunit A, protein phosphatase 2 [Homo sapiens] |
| gi\|5453958 | protein phosphatase 5, catalytic subunit [Homo sapiens] |
| gi\|38257139 | protein kinase, cAMP-dependent, regulatory, type I, beta [Homo sapiens] |
| gi\|20128774 | mitogen-activated protein kinase 11 [Homo sapiens] |
| gi\|11386147 | prosaposin isoform a preproprotein [Homo sapiens] |
| gi\|4506193 | proteasome beta 1 subunit [Homo sapiens] |
| gi\|25777602 | proteasome 26S non-ATPase subunit 2 [Homo sapiens] |
| gi\|18543329 | proteasome 26S non-ATPase subunit 9 [Homo sapiens] |
| gi\|4506217 | proteasome 26S non-ATPase subunit 10 isoform 1 [Homo sapiens] |
| gi\|46249388 | phosphoserine phosphatase [Homo sapiens] |
| gi\|28558998 | polypyrimidine tract-binding protein 1 isoform d [Homo sapiens] |
| gi\|4506281 | pleiotrophin [Homo sapiens] |
| gi\|4506367 | RAB3A, member RAS oncogene family [Homo sapiens] |
| gi\|9845511 | ras-related C3 botulinum toxin substrate 1 isoform RacI [Homo sapiens] |
| gi\|4506401 | v-raf-1 murine leukemia viral oncogene homolog 1 [Homo sapiens] |
| gi\|5453555 | ras-related nuclear protein [Homo sapiens] |
| gi\|93277122 | RNA binding motif protein 4 [Homo sapiens] |
| gi\|4506457 | reticulocalbin 2, EF-hand calcium binding domain [Homo sapiens] |
| gi\|5454004 | D4, zinc and double PHD fingers family 2 [Homo sapiens] |
| gi\|168983744 | tripartite motif-containing 27 [Homo sapiens] |
| gi\|156416009 | regulator of G-protein signalling 16 [Homo sapiens] |
| gi\|4506649 | ribosomal protein L3 isoform a [Homo sapiens] |
| gi\|16579885 | ribosomal protein L4 [Homo sapiens] |
| gi\|14591909 | ribosomal protein L5 [Homo sapiens] |
| gi\|16753227 | ribosomal protein L6 [Homo sapiens] |
| gi\|15431301 | ribosomal protein L7 [Homo sapiens] |
| gi\|4506661 | ribosomal protein L7a [Homo sapiens] |
| gi\|4506663 | ribosomal protein L8 [Homo sapiens] |
| gi\|15431303 | ribosomal protein L9 [Homo sapiens] |
| gi\|249371 | laminin receptor homolog [Homo sapiens] |
| gi\|15431290 | ribosomal protein L11 [Homo sapiens] |
| gi\|4506597 | ribosomal protein L12 [Homo sapiens] |
| gi\|15431295 | ribosomal protein L13 [Homo sapiens] |
| gi\|15431293 | ribosomal protein L15 [Homo sapiens] |
| gi\|4506617 | ribosomal protein L17 [Homo sapiens] |
| gi\|4506607 | ribosomal protein L18 [Homo sapiens] |
| gi\|11415026 | ribosomal protein L18a [Homo sapiens] |
| gi\|18104948 | ribosomal protein L21 [Homo sapiens] |
| gi\|4506613 | ribosomal protein L22 proprotein [Homo sapiens] |
| gi\|4506621 | ribosomal protein L26 [Homo sapiens] |
| gi\|4506629 | ribosomal protein L29 [Homo sapiens] |
| gi\|4506633 | ribosomal protein L31 isoform 1 [Homo sapiens] |
| gi\|16117791 | ribosomal protein L35a [Homo sapiens] |
| gi\|4506641 | ribosomal protein L37 [Homo sapiens] |
| gi\|4506643 | ribosomal protein L37a [Homo sapiens] |
| gi\|4506667 | ribosomal protein PO [Homo sapiens] |
| gi\|4506671 | ribosomal protein P2 [Homo sapiens] |
| gi\|15055539 | ribosomal protein S2 [Homo sapiens] |
| gi\|15718687 | ribosomal protein S3 [Homo sapiens] |
| gi\|4506723 | ribosomal protein S3a [Homo sapiens] |
| gi\|4506725 | ribosomal protein S4, X-linked X isoform [Homo sapiens] |
| gi\|4506727 | ribosomal protein S4, Y-linked 1 Y isoform [Homo sapiens] |
| gi\|13904870 | ribosomal protein S5 [Homo sapiens] |
| gi\|17158044 | ribosomal protein S6 [Homo sapiens] |
| gi\|4506743 | ribosomal protein S8 [Homo sapiens] |
| gi\|14141193 | ribosomal protein S9 [Homo sapiens] |
| gi\|4506679 | ribosomal protein S10 [Homo sapiens] |
| gi\|14277700 | ribosomal protein S12 [Homo sapiens] |
| gi\|4506685 | ribosomal protein S13 [Homo sapiens] |
| gi\|5032051 | ribosomal protein S14 [Homo sapiens] |
| gi\|4506687 | ribosomal protein S15 [Homo sapiens] |
| gi\|14165469 | ribosomal protein S15a [Homo sapiens] |
| gi\|4506691 | ribosomal protein S16 [Homo sapiens] |
| gi\|11968182 | ribosomal protein S18 [Homo sapiens] |
| gi\|4506701 | ribosomal protein S23 [Homo sapiens] |
| gi\|214010224 | ribosomal protein S24 isoform f [Homo sapiens] |
| gi\|4506707 | ribosomal protein S25 [Homo sapiens] |
| gi\|4506711 | ribosomal protein S27 [Homo sapiens] |
| gi\|4506713 | ubiquitin and ribosomal protein S27a precursor [Homo sapiens] |
| gi\|71772583 | ribosomal protein S29 isoform 2 [Homo sapiens] |
| gi\|45827776 | reticulon 1 isoform C [Homo sapiens] |
| gi\|16306548 | seryl-tRNA synthetase [Homo sapiens] |
| gi\|666052 | syndecan-1 [Homo sapiens] |
| gi\|119577915 | selenoprotein W, 1 [Homo sapiens] |
| gi\|5902076 | splicing factor, arginine/serine-rich 1 isoform 1 [Homo sapiens] |
| gi\|72534660 | splicing factor, arginine/serine-rich 7 [Homo sapiens] |
| gi\|4506913 | sarcoglycan, beta [Homo sapiens] |
| gi\|21389315 | solute carrier family 25 (mitochondrial carrier; citrate transporter), member 1 precursor |
| | [Homo sapiens] |
| gi\|21071056 | SWI/SNF-related matrix-associated actin-dependent regulator of chromatin a4 |
| | isoform B [Homo sapiens] |
| gi\|55956801 | SWI/SNF related, matrix associated, actin dependent regulator of chromatin, |
| | subfamily b, member 1 isoform b [Homo sapiens] |
| gi\|4507115 | fascin 1 [Homo sapiens] |
| gi\|29568103 | U1 small nuclear ribonucleoprotein 70 kDa [Homo sapiens] |
| gi\|4507125 | small nuclear ribonucleoprotein polypeptide B/B′ isoform B [Homo sapiens] |
| gi\|4507127 | small nuclear ribonucleoprotein polypeptide C [Homo sapiens] |
| gi\|4507171 | secreted protein, acidic, cysteine-rich [Homo sapiens] |
| gi\|5902122 | spectrin, beta, non-erythrocytic 2 [Homo sapiens] |
| gi\|38679884 | sorcin isoform b [Homo sapiens] |
| gi\|63253298 | spermidine synthase [Homo sapiens] |
| gi\|149999611 | signal recognition particle 14 kDa (homologous Alu RNA binding protein) [Homo sapiens] |
| gi\|15208660 | tripartite motif protein 21 [Homo sapiens] |
| gi\|108796056 | TROVE domain family, member 2 isoform 1 [Homo sapiens] |
| gi\|4507239 | signal sequence receptor, beta precursor [Homo sapiens] |
| gi\|94400932 | syntaxin 5 [Homo sapiens] |
| gi\|29540543 | sulfotransferase family, cytosolic, 1A, phenol-preferring, member 1 isoform b [Homo |
| | sapiens] |
| gi\|92859638 | synaptotagmin V [Homo sapiens] |
| gi\|4507373 | beta-tubulin cofactor C [Homo sapiens] |
| gi\|41350333 | beta-tubulin cofactor D [Homo sapiens] |
| gi\|4507385 | transcription elongation factor A protein 2 isoform a [Homo sapiens] |
| gi\|57863259 | T-complex protein 1 isoform b [Homo sapiens] |
| gi\|32189392 | peroxiredoxin 2 isoform a [Homo sapiens] |
| gi\|4507521 | transketolase isoform 1 [Homo sapiens] |
| gi\|21265104 | tetraspanin 7 [Homo sapiens] |
| gi\|4507645 | triosephosphate isomerase 1 [Homo sapiens] |
| gi\|4507677 | heat shock protein 90 kDa beta, member 1 [Homo sapiens] |
| gi\|58761484 | chaperonin containing TCP1, subunit 3 isoform c [Homo sapiens] |
| gi\|91208423 | thyroid receptor-interacting protein 6 [Homo sapiens] |
| gi\|116256350 | tuberous sclerosis 2 isoform 4 [Homo sapiens] |
| gi\|49640009 | tetratricopeptide repeat domain 3 [Homo sapiens] |
| gi\|4507729 | tubulin, beta 2 [Homo sapiens] |
| gi\|5803207 | U2 small nuclear RNA auxiliary factor 1 isoform a [Homo sapiens] |
| gi\|67191208 | ubiquitin C [Homo sapiens] |
| gi\|21361091 | ubiquitin carboxyl-terminal esterase L1 [Homo sapiens] |
| gi\|46593007 | ubiquinol-cytochrome c reductase core protein I [Homo sapiens] |
| gi\|46877105 | upstream stimulatory factor 2 isoform 2 [Homo sapiens] |
| gi\|4507877 | vinculin isoform VCL [Homo sapiens] |
| gi\|6005942 | valosin-containing protein [Homo sapiens] |
| gi\|4507879 | voltage-dependent anion channel 1 [Homo sapiens] |
| gi\|62414289 | vimentin [Homo sapiens] |
| gi\|88853069 | vitronectin precursor [Homo sapiens] |
| gi\|190684675 | X-ray repair cross complementing protein 1 [Homo sapiens] |
| gi\|4507949 | tyrosine 3-monooxygenase/tryptophan 5-monooxygenase activation protein, beta |
| | polypeptide [Homo sapiens] |
| gi\|5803225 | tyrosine 3/tryptophan 5-monooxygenase activation protein, epsilon polypeptide |
| | [Homo sapiens] |
| gi\|4507951 | tyrosine 3-monooxygenase/tryptophan 5-monooxygenase activation protein, eta |
| | polypeptide [Homo sapiens] |
| gi\|4507961 | zinc finger protein 36, C3H type, homolog [Homo sapiens] |
| gi\|4827071 | zinc finger protein 9 isoform 3 [Homo sapiens] |
| gi\|23510455 | zinc finger protein 41 [Homo sapiens] |
| gi\|27545332 | zinc finger protein 133 [Homo sapiens] |
| gi\|145977222 | zinc finger protein 154 [Homo sapiens] |
| gi\|32698678 | zinc finger protein 213 [Homo sapiens] |
| gi\|17986283 | tubulin, alpha 1a [Homo sapiens] |
| gi\|197333755 | interferon-related developmental regulator 2 [Homo sapiens] |
| gi\|54607089 | semaphorin 3B isoform 2 precursor [Homo sapiens] |
| gi\|4758112 | HLA-B associated transcript 1 [Homo sapiens] |
| gi\|4502483 | Ras association (Ra1GDS/AF-6) domain family (N-terminal) member 7 [Homo sapiens] |
| gi\|12962937 | achalasia, adrenocortical insufficiency, alacrimia (Allgrove, triple-A) [Homo sapiens] |
| gi\|134142817 | esl protein isoform lb precursor [Homo sapiens] |
| gi\|4507691 | transformation/transcription domain-associated protein [Homo sapiens] |
| gi\|4507183 | speckle-type POZ protein [Homo sapiens] |
| gi\|7657134 | glyceronephosphate 0-acyltransferase [Homo sapiens] |
| gi\|32307161 | cullin 1 [Homo sapiens] |
| gi\|41872527 | diacylglycerol kinase zeta isoform 3 [Homo sapiens] |
| gi\|32189362 | PTPRF interacting protein alpha 3 [Homo sapiens] |
| gi\|55769587 | probable nucleolar complex protein 14 [Homo sapiens] |
| gi\|117553627 | acetylserotonin 0-methyltransferase-like [Homo sapiens] |
| gi\|189571687 | nuclear autoantigen of 14 kDa [Homo sapiens] |
| gi\|16933557 | dachsous 1 precursor [Homo sapiens] |
| gi\|4505813 | dynein light chain 1 [Homo sapiens] |
| gi\|4503525 | eukaryotic translation initiation factor 3, subunit C [Homo sapiens] |
| gi\|4503523 | eukaryotic translation initiation factor 3 subunit D [Homo sapiens] |
| gi\|4503515 | eukaryotic translation initiation factor 3, subunit 3 gamma, 40 kDa [Homo sapiens] |
| gi\|4507285 | syntaxin 10 [Homo sapiens] |
| gi\|4505705 | phosphoprotein enriched in astrocytes 15 [Homo sapiens] |
| gi\|4506903 | splicing factor, arginine/serine-rich 9 [Homo sapiens] |
| gi\|4504079 | glycosylphosphatidylinositol anchor attachment protein 1 [Homo sapiens] |
| gi\|46909598 | a disintegrin and metalloproteinase domain 15 isoform 5 preproprotein [Homo sapiens] |
| gi\|4505229 | Fas-associated via death domain [Homo sapiens] |
| gi\|47933379 | N-ethylmaleimide-sensitive factor attachment protein, alpha [Homo sapiens] |
| gi\|19923191 | minichromosome maintenance complex component 3 associated protein [Homo |
| | sapiens] |
| gi\|14210504 | adaptor-related protein complex 1, mu 1 subunit isoform 2 [Homo sapiens] |
| gi\|4507913 | Wiskott-Aldrich syndrome protein family member 1 [Homo sapiens] |
| gi\|48762942 | huntingtin interacting protein-I-related [Homo sapiens] |
| gi\|78000181 | ribosomal protein L14 [Homo sapiens] |
| gi\|11141861 | claudin 9 [Homo sapiens] |
| gi\|115527080 | metastasis associated protein [Homo sapiens] |
| gi\|4759276 | RNA, U3 small nucleolar interacting protein 2 [Homo sapiens] |
| gi\|190358517 | RAB11B, member RAS oncogene family [Homo sapiens] |
| gi\|284005309 | ATP-dependent DNA helicase Q4 [Homo sapiens] |
| gi\|3834621 | homer-3 [Homo sapiens] |
| gi\|10834682 | PP3958 [Homo sapiens] |
| gi\|33695117 | p53-induced protein [Homo sapiens] |
| gi\|118344454 | sperm associated antigen 7 [Homo sapiens] |
| gi\|4758496 | H2A histone family, member Y isoform 2 [Homo sapiens] |
| gi\|195927015 | phosphatidylinositol transfer protein, membrane-associated isoform a [Homo sapiens] |
| gi\|116256445 | nuclear receptor co-repressor 2 isoform 2 [Homo sapiens] |
| gi\|22027622 | TNF receptor-associated factor 4 [Homo sapiens] |
| gi\|57242774 | hypothetical protein LOC9703 [Homo sapiens] |
| gi\|7661916 | lysosomal protein transmembrane 4 alpha [Homo sapiens] |
| gi\|7661890 | sorting nexin 17 [Homo sapiens] |
| gi\|17999539 | DEAH (Asp-Glu-Ala-His) box polypeptide 38 [Homo sapiens] |
| gi\|55769518 | inositol hexakisphosphate kinase 1 isoform 2 [Homo sapiens] |
| gi\|110624774 | mannose receptor, C type 2 [Homo sapiens] |
| gi\|55925608 | kelch-like 21 [Homo sapiens] |
| gi\|151108509 | Rho GTPase-activating protein RICH2 [Homo sapiens] |
| gi\|55770886 | ubiquitin specific protease 3 [Homo sapiens] |
| gi\|14110407 | heterogeneous nuclear ribonucleoprotein D-like [Homo sapiens] |
| gi\|62750347 | histone deacetylase 5 isoform 1 [Homo sapiens] |
| gi\|194294519 | nuclear receptor subfamily 1, group H, member 3 isoform c [Homo sapiens] |
| gi\|65301139 | ATPase, class II, type 9A [Homo sapiens] |
| gi\|5031595 | actin related protein 2/3 complex subunit 4 isoform a [Homo sapiens] |
| gi\|6912540 | nucleotide binding protein 2 (MinD homolog, E. coli) [Homo sapiens] |
| gi\|5031569 | ARP1 actin-related protein 1 homolog A, centractin alpha [Homo sapiens] |
| gi\|155722983 | TNF receptor-associated protein 1 [Homo sapiens] |
| gi\|121114294 | RAS p21 protein activator 4 isoform 1 [Homo sapiens] |
| gi\|5031633 | FERM, RhoGEF, and pleckstrin domain protein 1 isoform 1 [Homo sapiens] |
| gi\|5032031 | RNA binding motif protein 5 [Homo sapiens] |
| gi\|5032133 | eukaryotic translation initiation factor 1 [Homo sapiens] |
| gi\|74735668 | RecName: Full = Major facilitator superfamily domain-containing protein 10; |
| | AltName: Full = Tetracycline transporter-like protein |
| gi\|5031669 | cyclin-dependent kinase 2 associated protein 2 [Homo sapiens] |
| gi\|56181387 | STIP1 homology and U-box containing protein 1 [Homo sapiens] |
| gi\|95147542 | amyloid beta precursor protein-binding, family B, member 3 isoform a [Homo sapiens] |
| gi\|116256481 | TNFAIP3 interacting protein 1 [Homo sapiens] |
| gi\|57013276 | tubulin, alpha, ubiquitous [Homo sapiens] |
| gi\|50592996 | tubulin, beta, 4 [Homo sapiens] |
| gi\|21361322 | tubulin, beta 4 [Homo sapiens] |
| gi\|5174735 | tubulin, beta, 2 [Homo sapiens] |
| gi\|37655183 | N-myc downstream regulated 1 [Homo sapiens] |
| gi\|5174447 | guanine nucleotide binding protein (G protein), beta polypeptide 2-like 1 [Homo sapiens] |
| gi\|5454064 | RNA binding motif protein 14 [Homo sapiens] |
| gi\|17136143 | olfactomedin related ER localized protein isoform 1 [Homo sapiens] |
| gi\|29893564 | microspherule protein 1 isoform 1 [Homo sapiens] |
| gi\|5174723 | translocase of outer mitochondrial membrane 40 [Homo sapiens] |
| gi\|9257197 | BAII-associated protein 2 isoform 1 [Homo sapiens] |
| gi\|19923354 | zinc finger protein 238 isoform 2 [Homo sapiens] |
| gi\|23397429 | eukaryotic translation initiation factor 3, subunit M [Homo sapiens] |
| gi\|5453595 | adenylyl cyclase-associated protein [Homo sapiens] |
| gi\|5454166 | vesicle transport through interaction with t-SNAREs 1B [Homo sapiens] |
| gi\|18379349 | vesicle amine transport protein 1 [Homo sapiens] |
| gi\|6102858 | hypothetical protein [Homo sapiens] |
| gi\|36287060 | K(lysine) acetyltransferase 5 isoform 3 [Homo sapiens] |
| gi\|5453838 | Sjogren syndrome/scleroderma autoantigen 1 [Homo sapiens] |
| gi\|95113651 | glutaredoxin 3 [Homo sapiens] |
| gi\|5453629 | dynactin 2 [Homo sapiens] |
| gi\|26051229 | mitochondrial ribosomal protein L28 [Homo sapiens] |
| gi\|58331185 | chaperonin containing TCP1, subunit 7 isoform b [Homo sapiens] |
| gi\|197383077 | PDZ and LIM domain 5 isoform a [Homo sapiens] |
| gi\|32454737 | tripartite motif-containing 3 [Homo sapiens] |
| gi\|171184421 | thioredoxin interacting protein [Homo sapiens] |
| gi\|5454030 | RAS-related on chromosome 22 isoform a [Homo sapiens] |
| gi\|5729794 | CUG triplet repeat, RNA-binding protein 1 isoform 1 [Homo sapiens] |
| gi\|10835246 | Kruppel-like factor 1 (erythroid) [Homo sapiens] |
| gi\|5729999 | Ras-related GTP binding A [Homo sapiens] |
| gi\|5729953 | nuclear distribution gene C homolog [Homo sapiens] |
| gi\|38261971 | cyclic AMP-regulated phosphoprotein, 21 kD isoform 1 [Homo sapiens] |
| gi\|28269672 | serologically defined colon cancer antigen 8 [Homo sapiens] |
| gi\|42544159 | heat shock 105 kD [Homo sapiens] |
| gi\|5729875 | progesterone receptor membrane component 1 [Homo sapiens] |
| gi\|5730015 | RUN domain containing 3A [Homo sapiens] |
| gi\|19387846 | melanoma antigen family D, 2 [Homo sapiens] |
| gi\|5802970 | AFG3 ATPase family gene 3-like 2 [Homo sapiens] |
| gi\|5803023 | lectin, mannose-binding 2 precursor [Homo sapiens] |
| gi\|5803013 | endoplasmic reticulum protein 29 isoform 1 precursor [Homo sapiens] |
| gi\|5870893 | solute carrier family 38, member 3 [Homo sapiens] |
| gi\|166795250 | kinesin family member 2C [Homo sapiens] |
| gi\|33286446 | opioid growth factor receptor [Homo sapiens] |
| gi\|34850061 | superiorcervical ganglia, neural specific 10 [Homo sapiens] |
| gi\|16554627 | WD repeat domain 5 [Homo sapiens] |
| gi\|66472382 | nischarin [Homo sapiens] |
| gi\|6005860 | ribosomal protein L35 [Homo sapiens] |
| gi\|9966764 | lysophospholipase II [Homo sapiens] |
| gi\|45446743 | DEAD box polypeptide 42 protein [Homo sapiens] |
| gi\|32528286 | acyl-CoA thioesterase 7 isoform hBACHd [Homo sapiens] |
| gi\|6005764 | GABA(A) receptor-associated protein [Homo sapiens] |
| gi\|11559929 | coatomer protein complex, subunit gamma 1 [Homo sapiens] |
| gi\|17978512 | poly-U binding splicing factor 60 KDa isoform a [Homo sapiens] |
| gi\|41281557 | latrophilin 1 isoform 2 precursor [Homo sapiens] |
| gi\|41349441 | SEC31 homolog A isoform 2 [Homo sapiens] |
| gi\|57242755 | calsyntenin 1 isoform 2 [Homo sapiens] |
| gi\|20336290 | DEAH (Asp-Glu-Ala-His) box polypeptide 30 isoform 2 [Homo sapiens] |
| gi\|21396480 | RNA binding protein (autoantigenic, hnRNP-associated with lethal yellow) short |
| | isoform [Homo sapiens] |
| gi\|66932902 | SREBF chaperone protein [Homo sapiens] |
| gi\|58761546 | amine oxidase (flavin containing) domain 2 isoform b [Homo sapiens] |
| gi\|42516565 | ubiquitin specific protease 33 isoform 2 [Homo sapiens] |
| gi\|83716024 | kinesin family member 21B [Homo sapiens] |
| gi\|24307983 | FtsJ methyltransferase domain containing 2 [Homo sapiens] |
| gi\|122937251 | jumonji domain containing 3, histone lysine demethylase [Homo sapiens] |
| gi\|155722994 | zinc finger CCCH-type containing 3 [Homo sapiens] |
| gi\|67763814 | death-inducing-protein [Homo sapiens] |
| gi\|112421108 | capicua homolog [Homo sapiens] |
| gi\|154689719 | hypothetical protein LOC23231 [Homo sapiens] |
| gi\|21327667 | block of proliferation 1 [Homo sapiens] |
| gi\|62241044 | exocyst complex component 7 isoform b [Homo sapiens] |
| gi\|82659109 | retinoblastoma-associated factor 600 [Homo sapiens] |
| gi\|21624607 | coactosin-like 1 [Homo sapiens] |
| gi\|18034692 | CDW92 antigen [Homo sapiens] |
| gi\|7657455 | pescadillo homolog 1, containing BRCT domain [Homo sapiens] |
| gi\|45827731 | scribble isoform a [Homo sapiens] |
| gi\|6912458 | calcineurin binding protein 1 [Homo sapiens] |
| gi\|6912674 | SNAP-associated protein [Homo sapiens] |
| gi\|7524354 | dimethylarginine dimethylaminohydrolase 2 [Homo sapiens] |
| gi\|164519084 | RAB GTPase activating protein 1 [Homo sapiens] |
| gi\|112363070 | hsp70-interacting protein [Homo sapiens] |
| gi\|72534684 | phospholipase D family, member 3 [Homo sapiens] |
| gi\|6912490 | transcription factor MAFF [Homo sapiens] |
| gi\|52630440 | FK506-binding protein 8 [Homo sapiens] |
| gi\|7657345 | mitochondrial carrier homolog 1 [Homo sapiens] |
| gi\|160420328 | SHC (Src homology 2 domain containing) transforming protein 2 [Homo sapiens] |
| gi\|194306564 | 6-phosphogluconolactonase [Homo sapiens] |
| gi\|6912238 | peroxiredoxin 5 isoform a precursor [Homo sapiens] |
| gi\|4507975 | zinc finger protein 345 [Homo sapiens] |
| gi\|32698704 | hypothetical protein LOC25851 [Homo sapiens] |
| gi\|17530785 | breast cancer metastasis suppressor 1 isoform 1 [Homo sapiens] |
| gi\|36796743 | methylenetetrahydrofolate dehydrogenase (NADP+ dependent) 1-like [Homo sapiens] |
| gi\|20070260 | cofactor of BRCA1 [Homo sapiens] |
| gi\|195972913 | nasal embryonic LHRH factor isoform d [Homo sapiens] |
| gi\|7661696 | hypothetical protein LOC26017 [Homo sapiens] |
| gi\|5911953 | hypothetical protein [Homo sapiens] |
| gi\|41872443 | TRPC4-associated protein isoform b [Homo sapiens] |
| gi\|31542521 | N-acetyltransferase 9 (GCN5-related, putative) [Homo sapiens] |
| gi\|150170699 | kinesin family member 26A [Homo sapiens] |
| gi\|28416431 | GTPase, IMAP family member 2 [Homo sapiens] |
| gi\|215277017 | protein tyrosine phosphatase, non-receptor type 18 isoform 2 [Homo sapiens] |
| gi\|46367787 | poly(A) binding protein, cytoplasmic 1 [Homo sapiens] |
| gi\|7656952 | calcyclin binding protein isoform 1 [Homo sapiens] |
| gi\|7657599 | sorting nexin 5 [Homo sapiens] |
| gi\|148727368 | bromodomain and PHD finger containing, 3 [Homo sapiens] |
| gi\|7657514 | GTP-binding protein RHO6 [Homo sapiens] |
| gi\|140560994 | growth inhibition and differentiation related protein 86 [Homo sapiens] |
| gi\|166235178 | PDZ and LIM domain protein 3 isoform b [Homo sapiens] |
| gi\|7657196 | zinc finger protein 330 [Homo sapiens] |
| gi\|158256596 | unnamed protein product [Homo sapiens] |
| gi\|167466201 | WAS protein family homolog 1 [Homo sapiens] |
| gi\|58219048 | hairy and enhancer of split 5 [Homo sapiens] |
| gi\|157819143 | hypothetical protein LOC402665 [Homo sapiens] |
| gi\|39992616 | PIM3 protein [Homo sapiens] |
| gi\|169161838 | PREDICTED: similar to hCG2040565 [Homo sapiens] |
| gi\|205830928 | RecName: Full = TLC domain-containing protein 2 |
| gi\|119964728 | D-2-hydroxyglutarate dehydrogenase precursor [Homo sapiens] |
| gi\|124249392 | DNL-type zinc finger [Homo sapiens] |

1-18. (canceled)

19. A method for diagnosing systemic lupus erythematosus, comprising
a) contacting a solid support having applied thereon at least one marker sequence of a cDNA selected from the group SEQ 1-716 and/or SEQ 1a-716a, or a respective protein coding therefor, or a respective partial sequence or fragment thereof with body fluid or tissue extract of a patient, and
b) detecting an interaction of the body fluid or tissue extract with said at least one marker sequence.

20. The method for diagnosing systemic lupus erythematosus according to claim 19, wherein said at least one marker sequence is a protein encoded by a cDNA selected from the group SEQ 1-716 and/or SEQ 1a-716a, or a respective partial sequence or fragment thereof, and
wherein said method further comprises normalizing said at least one marker sequence with autoantibodies from patients who do not have systemic lupus erythematosus.

21. A method for risk stratification or for managing the treatment of a patient with systemic lupus erythematosus, comprising
determining the presence of at least one marker sequence of a cDNA selected from the group SEQ 1-716 and/or SEQ 1a-716, or a respective protein coding therefor, or a respective partial sequence or fragment thereof in body fluid or tissue extract of a patient.

22. The method according to claim 21, wherein the stratification or the treatment management comprises decisions regarding the treatment and therapy of the patient, in particular hospitalization of the patient, use, effect and/or dosage of one or more pharmaceuticals, a therapeutic measure, or monitoring the progression of an illness or treatment, etiology, or classification of a disease, including prognosis.

23. An arrangement of marker sequences comprising at least one marker sequence of a cDNA selected from the group SEQ 1-716 and/or SEQ 1a-716a, or a respective protein coding therefor, wherein SEQ 1-716 and/or SEQ 1a-716a are identified by way of a normalized protein biochip.

24. The arrangement according to claim 23, characterized in that at least 2 to 5 or 10, preferably 30 to 50 marker sequences, or 50 to 100 or more marker sequences are present.

25. The arrangement according to claim 23, characterized in that the marker sequences are present in the form of clones.

26. An assay, protein biochip comprising an arrangement according to claim 23, characterized in that the marker sequences are applied to a solid support.

The application's sequence listing, which the Patent Office published only in electronic form, follows.

SEQUENCE LISTING (716 sequences)

SEQ ID NO: 1 - DNA, 1157 bp, Homo sapiens
  misc_feature (757)..(757): n is a, c, g, or t
  misc_feature (872)..(872): n is a, c, g, or t
  misc_feature (893)..(893): n is a, c, g, or t
  misc_feature (922)..(922): n is a, c, g, or t
  misc_feature (929)..(929): n is a, c, g, or t
  misc_feature (931)..(931): n is a, c, g, or t
  misc_feature (959)..(959): n is a, c, g, or t
  misc_feature (966)..(966): n is a, c, g, or t
  misc_feature (971)..(971): n is a, c, g, or t
  misc_feature (973)..(973): n is a, c, g, or t
  misc_feature (987)..(987): n is a, c, g, or t
  misc_feature (994)..(995): n is a, c, g, or t
  misc_feature (1000)..(1000): n is a, c, g, or t
  misc_feature (1012)..(1012): n is a, c, g, or t
  misc_feature (1019)..(1019): n is a, c, g, or t
  misc_feature (1025)..(1025): n is a, c, g, or t
  misc_feature (1039)..(1039): n is a, c, g, or t
  misc_feature (1045)..(1045): n is a, c, g, or t
  misc_feature (1049)..(1049): n is a, c, g, or t
  misc_feature (1057)..(1057): n is a, c, g, or t
  misc_feature (1075)..(1075): n is a, c, g, or t
  misc_feature (1077)..(1077): n is a, c, g, or t
  misc_feature (1082)..(1083): n is a, c, g, or t
  misc_feature (1086)..(1086): n is a, c, g, or t
  misc_feature (1089)..(1089): n is a, c, g, or t
  misc_feature (1097)..(1097): n is a, c, g, or t
  misc_feature (1099)..(1099): n is a, c, g, or t
  misc_feature (1112)..(1113): n is a, c, g, or t
  misc_feature (1115)..(1115): n is a, c, g, or t
  misc_feature (1120)..(1120): n is a, c, g, or t
  misc_feature (1123)..(1123): n is a, c, g, or t
  misc_feature (1130)..(1130): n is a, c, g, or t
  misc_feature (1138)..(1138): n is a, c, g, or t
gcccacgcgtccgcagtcactcaccctgttgtccgcaatgccctgttttgcctggagtcagcctggaagacagcacaagaaggggaccatggcagccatgtatataccaaagcactgctggcctatgcttttgccctggcaggtaaccaggacaagaggaaggaagtactcaagtcacttaatgaggaagctgtgaagaaagacaactctgtccattgggagcgccctcagaaacccaaggcaccagtggggcatttttacgaaccccaggctccctctgctgaggtggagatgacatcctatgtgctcctcgcttatctcacggcccagccagccccaacctcggaggacctgacctctgcaaccaacatcgtgaagtggatcacgaagcagcagaatgcccagggcggtttctcctccacccaggacacagtggtggctctccatgctctgtccaaatatggagcagccacatttaccaggactgggaaggctgcacaggtgactatccagtcttcagggacattttccagcaaattccaagtggacaacaacaaccgcctgttactgcagcaggtctcattgccagagctgcctggggaatacagcatgaaagtgacaggagaaggatgtgtctacctccagacatccttgaaatacaatattctcccagaaaaggaagagttcccctttgctttaggagtgcagactctgcctcaaacttgtgatgaacccaaagcccacaccagcttccaantctccctaagtgtcagttacacagggagccgctctgcctccaacatggcgatcgttgatgtgaagatggtctctggcttcattcccctgaagccaacagtgaaaatgcttgaaanatctaaccatgtgagccgganaaaattcaccagcaaccatgtctggattnccttganangggtcaaatcaaaactgagcttgttttnccggttntgcanangtcccgtaaaaatntgaaccnncctantgaagttttatnctacaanggaganttgcattgtgaaanatgtcntgcncaaatttngaaattttgaaacaaagntnaaagnnttntgnatctgttncnaaatccaaaaaanngnttttnttnttaaatngaaaaaanatttttggcaaaaaaaaaa

SEQ ID NO: 2 - DNA, 1033 bp, Homo sapiens
  misc_feature (13)..(13): n is a, c, g, or t
  misc_feature (565)..(565): n is a, c, g, or t
  misc_feature (642)..(642): n is a, c, g, or t
  misc_feature (657)..(657): n is a, c, g, or t
  misc_feature (682)..(682): n is a, c, g, or t
  misc_feature (708)..(708): n is a, c, g, or t
  misc_feature (728)..(728): n is a, c, g, or t
  misc_feature (741)..(741): n is a, c, g, or t
  misc_feature (750)..(750): n is a, c, g, or t
  misc_feature (754)..(754): n is a, c, g, or t
  misc_feature (757)..(757): n is a, c, g, or t
  misc_feature (771)..(771): n is a, c, g, or t
  misc_feature (783)..(783): n is a, c, g, or t
  misc_feature (786)..(786): n is a, c, g, or t
  misc_feature (810)..(810): n is a, c, g, or t
  misc_feature (819)..(819): n is a, c, g, or t
  misc_feature (826)..(826): n is a, c, g, or t
  misc_feature (834)..(834): n is a, c, g, or t
  misc_feature (837)..(837): n is a, c, g, or t
  misc_feature (846)..(846): n is a, c, g, or t
  misc_feature (857)..(857): n is a, c, g, or t
  misc_feature (862)..(862): n is a, c, g, or t
  misc_feature (873)..(873): n is a, c, g, or t
  misc_feature (875)..(875): n is a, c, g, or t
  misc_feature (882)..(882): n is a, c, g, or t
  misc_feature (888)..(888): n is a, c, g, or t
  misc_feature (894)..(894): n is a, c, g, or t
  misc_feature (905)..(905): n is a, c, g, or t
  misc_feature (907)..(907): n is a, c, g, or t
  misc_feature (916)..(917): n is a, c, g, or t
  misc_feature (929)..(929): n is a, c, g, or t
  misc_feature (937)..(938): n is a, c, g, or t
  misc_feature (940)..(941): n is a, c, g, or t
  misc_feature (944)..(944): n is a, c, g, or t
  misc_feature (950)..(950): n is a, c, g, or t
  misc_feature (967)..(967): n is a, c, g, or t
  misc_feature (981)..(982): n is a, c, g, or t
  misc_feature (1002)..(1002): n is a, c, g, or t
  misc_feature (1005)..(1005): n is a, c, g, or t
  misc_feature (1010)..(1010): n is a, c, g, or t
  misc_feature (1014)..(1014): n is a, c, g, or t
  misc_feature (1021)..(1021): n is a, c, g, or t
  misc_feature (1023)..(1023): n is a, c, g, or t
  misc_feature (1027)..(1027): n is a, c, g, or t
ggtttgggcccanagaagtggatccgccgcttgcgccgcatggagtccgaatcggaaagcggggctgctgctgacacccccccactggagaccctaagcttccatggtgatgaagagattatcgaggtggtagaacttgatcccggtccgccggacccagatgacctggcccaggagatggaagatgtggactttgaggaagaagaggaggaagagggcaacgaagagggctgggttctagaaccccaggaaggggtggtcggcagcatggagggccccgacgatagcgaggtcacctttgcattgcactcagcatctgtgttttgtgtgagcctggaccccaagaccaataccttggcagtgaccgggggtgaagatgacaaagccttcgtatggcggctcagcgatggggagctgctctttgagtgtgcaggccataaagactctgtgacttgtgctggtttcagccatgactccactctagtggccacaggggacatgagtggcctcttgaaagtgtggcaggtggacactaaggaggaggtctggtcctttgaagcggganacctggagtggatggagtggcatcctcgggcacctgtcctgttggcgggcacagctgacggcaacacctggatgtgnaaagtcccgaaatgntgactgcaagaccttccagggtccnaaactgcccaacccacctgtggcccnaattcctccctgatggaaanaggagcttgtggnaggcctatnaaanatnggaccattcagganttgggaacctgnaancaaggggaaacccctatccatgtncttgaaagnggaactnaaggttcnccnagggccccncctcacctgtntttgnctgcccaaccnanaatggcnaccttnaatccntaaattggctntngtggaactnnccaggcccaaantgggtcanngnnccnccaccngcaaagggtgggggggngttttttaaacctnnggacttttggcctcccccanacnccacntggnaaaaagngnaaantaaaat

SEQ ID NO: 3 - DNA, 1069 bp, Homo sapiens
  misc_feature (716)..(716): n is a, c, g, or t
  misc_feature (719)..(719): n is a, c, g, or t
  misc_feature (833)..(833): n is a, c, g, or t
  misc_feature (839)..(839): n is a, c, g, or t
  misc_feature (841)..(841): n is a, c, g, or t
  misc_feature (844)..(844): n is a, c, g, or t
  misc_feature (850)..(850): n is a, c, g, or t
  misc_feature (857)..(857): n is a, c, g, or t
  misc_feature (860)..(860): n is a, c, g, or t
  misc_feature (884)..(884): n is a, c, g, or t
  misc_feature (886)..(886): n is a, c, g, or t
  misc_feature (889)..(889): n is a, c, g, or t
  misc_feature (893)..(893): n is a, c, g, or t
  misc_feature (906)..(906): n is a, c, g, or t
  misc_feature (919)..(919): n is a, c, g, or t
  misc_feature (927)..(927): n is a, c, g, or t
  misc_feature (943)..(943): n is a, c, g, or t
  misc_feature (953)..(953): n is a, c, g, or t
  misc_feature (961)..(961): n is a, c, g, or t
  misc_feature (963)..(963): n is a, c, g, or t
  misc_feature (968)..(968): n is a, c, g, or t
  misc_feature (979)..(979): n is a, c, g, or t
  misc_feature (983)..(983): n is a, c, g, or t
  misc_feature (990)..(990): n is a, c, g, or t
  misc_feature (998)..(998): n is a, c, g, or t
  misc_feature (1010)..(1010): n is a, c, g, or t
  misc_feature (1016)..(1016): n is a, c, g, or t
  misc_feature (1019)..(1019): n is a, c, g, or t
  misc_feature (1032)..(1032): n is a, c, g, or t
  misc_feature (1048)..(1050): n is a, c, g, or t
  misc_feature (1053)..(1053): n is a, c, g, or t
  misc_feature (1056)..(1057): n is a, c, g, or t
  misc_feature (1059)..(1059): n is a, c, g, or t
  misc_feature (1067)..(1067): n is a, c, g, or t
ggtgccagtacaacttcctgcggcggccacagcgcatgcctgtgtctaccaagcctgtggaggatgatgtggacgtggccagtgagcggcagcgagtgctccggggagacgccgacaatgacatggtcaagattgagaacctgaccaaggtctacaagtcccggaagattggccgtatcctggccgttgaccgcctgtgcctgggtgtgcgtcctggcgagtgcttcgggctcctgggcgtcaacggtgcgggcaagaccagcaccttcaagatgctgaccggcgacgagagcacgacggggggcgaggccttcgtcaatggacacagcgtgctgaaggagctgctccaggtgcagcagagcctcggctactgcccgcagtgtgacgcgctgttcgacgagctcacggcccgggagcacctgcagctgtacacgcggctgcgtgggatctcctggaaggacgaggcccgggtggtgaagtgggctctggagaagctggagctgaccaagtacgcagacaagccggctggcacctacagcggcggcaacaagcggaagctctccacggccatcgccctcattgggtacccagccttcatcttcctggacgagcccaccacaggcatggaccccaaggcccggcgcttcctctggaacctcatcctcgacctcatcaagacagggcgttcagtggtgctgacatcacacagcatggangantgcgaggcgctgtgcacgcggctggccatcatggtgaacggtcgcctgcggtgcctgggcagcatccagcacctgaagaaccggtttggagatggctacatgatcacggtgcgnaccaanancanccaaantgtgaangangtggtgcggttcttcaaccgcaantnccngaancatgctcaaggancggcacccacaangtgcatancagctcaagtcgaacnattctcctgnccagtgtnancaaantgaacaggttntggntgttggnatcaagantattcgtcaccnaacaantgnaaatggttctgantttccaaaacaaatgnnnctnganncnggaaggancc

SEQ ID NO: 4 - DNA, 1256 bp, Homo sapiens
  misc_feature (789)..(789): n is a, c, g, or t
  misc_feature (820)..(820): n is a, c, g, or t
  misc_feature (836)..(836): n is a, c, g, or t
  misc_feature (846)..(846): n is a, c, g, or t
  misc_feature (864)..(864): n is a, c, g, or t
  misc_feature (867)..(867): n is a, c, g, or t
  misc_feature (872)..(872): n is a, c, g, or t
  misc_feature (884)..(884): n is a, c, g, or t
  misc_feature (914)..(914): n is a, c, g, or t
  misc_feature (937)..(938): n is a, c, g, or t
  misc_feature (957)..(957): n is a, c, g, or t
  misc_feature (960)..(960): n is a, c, g, or t
  misc_feature (962)..(962): n is a, c, g, or t
  misc_feature (983)..(984): n is a, c, g, or t
  misc_feature (989)..(989): n is a, c, g, or t
  misc_feature (1001)..(1001): n is a, c, g, or t
  misc_feature (1009)..(1009): n is a, c, g, or t
  misc_feature (1012)..(1012): n is a, c, g, or t
  misc_feature (1030)..(1030): n is a, c, g, or t
  misc_feature (1043)..(1043): n is a, c, g, or t
  misc_feature (1056)..(1056): n is a, c, g, or t
  misc_feature (1069)..(1069): n is a, c, g, or t
  misc_feature (1072)..(1072): n is a, c, g, or t
  misc_feature (1076)..(1076): n is a, c, g, or t
  misc_feature (1081)..(1081): n is a, c, g, or t
  misc_feature (1089)..(1089): n is a, c, g, or t
  misc_feature (1091)..(1091): n is a, c, g, or t
  misc_feature (1112)..(1112): n is a, c, g, or t
  misc_feature (1124)..(1125): n is a, c, g, or t
  misc_feature (1128)..(1129): n is a, c, g, or t
  misc_feature (1142)..(1142): n is a, c, g, or t
  misc_feature (1148)..(1148): n is a, c, g, or t
  misc_feature (1159)..(1159): n is a, c, g, or t
  misc_feature (1163)..(1163): n is a, c, g, or t
  misc_feature (1167)..(1167): n is a, c, g, or t
  misc_feature (1171)..(1171): n is a, c, g, or t
  misc_feature (1182)..(1182): n is a, c, g, or t
  misc_feature (1185)..(1185): n is a, c, g, or t
  misc_feature (1194)..(1194): n is a, c, g, or t
  misc_feature (1197)..(1197): n is a, c, g, or t
  misc_feature (1199)..(1200): n is a, c, g, or t
  misc_feature (1224)..(1224): n is a, c, g, or t
  misc_feature (1237)..(1237): n is a, c, g, or t
  misc_feature (1250)..(1250): n is a, c, g, or t
gccatggtcaagatccccagcaaagcctcagccaagtacctggccaagaagttcaacaaatctgagcaatacataggggagaacatcctggtgctggacattttctttgaagtcctcaactatgagaccattgaacagaagaaggcctatgagattgcagggctcctgggtgacatcgggggccagatggggctgttcatcggggccagcatcctcacggtgctggagctctttgactacgcctacgaggtcattaagcacaagctgtgccgacgaggaaaatgccagaaggaggccaaaaggagcagtgcggacaagggcgtggccctcagcctggacgacgtcaaaagacacaacccgtgcgagagccttcggggccaccctgccgggatgacatacgctgccaacatcctacctcaccatccggcccgaggcacgttcgaggactttacctgctgagccccgcaggccgctgaaccaaaggcctagatggggaggactaggagagcgagggggcccccagctgcctcctcacatctgccctggggactccccacactccggggcagatctttcctcttgtctgtggtaaggaaggagtcttgaccatagagtcctctctctgcctctatcccattctttttacatttaacaaaactaatctaaaaaagaactaaaaagggagaacggggcaagggacctcaggctgcccctctctcctccatgctgcctcccctagctcccagcctgaattctgtcttatctagctgtctgccatctgagtgtccnatctacattctgctgccaccagtcaccaaangccccttcccagtgangggtggaaanggaatctctggggtctgnaantttgnccccaaacccanaaaatgtaccttaagggggaaggctaatgntgggggaagggaggcttccccannccttaaaaaaccctctcanccnantgaattgtccccaaacccaanntctcntgggaaggaacnaaaacctnaancccatttttttcaaaccntgtgaaaatcccngggggggcggggntccccttaaaaanggntaanggggnaaaaaatngngcccgggggctggaggccacntcctgaaacctnnaanntcccccccccccnacgttntgggaaaaaantccnaaanggancccttcccccnctncattaaaanctngnngttaaccccccctagggaaaaggncgaggccaccccngggcccccccganggcttt

SEQ ID NO: 5 - DNA, 1080 bp, Homo sapiens
  misc_feature (807)..(807): n is a, c, g, or t
  misc_feature (820)..(820): n is a, c, g, or t
  misc_feature (825)..(825): n is a, c, g, or t
  misc_feature (834)..(834): n is a, c, g, or t
  misc_feature (840)..(840): n is a, c, g, or t
  misc_feature (886)..(886): n is a, c, g, or t
  misc_feature (893)..(893): n is a, c, g, or t
  misc_feature (937)..(937): n is a, c, g, or t
  misc_feature (943)..(943): n is a, c, g, or t
  misc_feature (985)..(985): n is a, c, g, or t
  misc_feature (996)..(996): n is a, c, g, or t
  misc_feature (999)..(999): n is a, c, g, or t
  misc_feature (1007)..(1007): n is a, c, g, or t
  misc_feature (1015)..(1015): n is a, c, g, or t
  misc_feature (1034)..(1034): n is a, c, g, or t
  misc_feature (1044)..(1044): n is a, c, g, or t
  misc_feature (1048)..(1048): n is a, c, g, or t
  misc_feature (1054)..(1054): n is a, c, g, or t
  misc_feature (1062)..(1062): n is a, c, g, or t
  misc_feature (1065)..(1065): n is a, c, g, or t
  misc_feature (1069)..(1069): n is a, c, g, or t
  misc_feature (1073)..(1073): n is a, c, g, or t
  misc_feature (1075)..(1076): n is a, c, g, or t
  misc_feature (1078)..(1078): n is a, c, g, or t
gcccacgcgtccgcaggtgcaatcgtggaataccacgggcctggtgtagactccatctcctgcactggcatggcgacaatctgcaacatgggtgcagaaattggggccaccacttccgtgttcccttacaaccacaggatgaagaagtacctgagcaagaccggccgggaagacattgccaatctagctgatgaattcaaggatcacttggtgcctgaccctggctgccattatgaccaactaattgaaattaacctcagtgagctgaagccacacatcaatgggcccttcacccctgacctggctcaccctgtggcagaagtgggcaaggtggcagagaaggaaggatggcctctggacatccgagtgggtctaattggtagctgcaccaattcaagctatgaagatatggggcgctcagcagctgtggccaagcaggcactggcccatggcctcaagtgcaagtcccagttcaccatcactccaggttccgagcagatccgcgccaccattgagcgggacggctatgcacagatcttgagggatctgggtggcattgtcctggccaatgcttgtggcccctgcattggccagtgggacaggaaggacatcaagaagggggagaagaacacaatcgtcacctcctacaacaggaacttcacgggccgcaacgacgcaaaccccgagacccatgcctttgtcacgtccccagagattgtcacagccctggccattgcgggaaccctcaagttcaacccaaagaccgactacctgacgggcacggatggcaaaaagttcaggctggangctccggatgcanatgancttcccaangggaantttgacccagggcaggacacctacagcacccacccaaggacagcancgggcancatgtggacgtgagccccacagccagcgcctgcagctcctggancctttnacaagtgggaatggcaaggacctggagaacttgcaaatctcntcaaggtcaanggnaatgtacnctgaccantttcactggtggccctggntcaattccgngggnccttgnaaaaattntcnaaanctgntnntngg

SEQ ID NO: 6 - DNA, 937 bp, Homo sapiens
  misc_feature (739)..(739): n is a, c, g, or t
  misc_feature (774)..(774): n is a, c, g, or t
  misc_feature (784)..(784): n is a, c, g, or t
  misc_feature (856)..(856): n is a, c, g, or t
  misc_feature (861)..(861): n is a, c, g, or t
  misc_feature (864)..(864): n is a, c, g, or t
  misc_feature (873)..(873): n is a, c, g, or t
  misc_feature (879)..(879): n is a, c, g, or t
  misc_feature (886)..(886): n is a, c, g, or t
  misc_feature (890)..(890): n is a, c, g, or t
  misc_feature (901)..(901): n is a, c, g, or t
  misc_feature (903)..(903): n is a, c, g, or t
  misc_feature (911)..(911): n is a, c, g, or t
  misc_feature (917)..(919): n is a, c, g, or t
  misc_feature (922)..(923): n is a, c, g, or t
  misc_feature (927)..(927): n is a, c, g, or t
  misc_feature (935)..(935): n is a, c, g, or t
  misc_feature (937)..(937): n is a, c, g, or t
gcgcgagcacagagcctcgcctttgccgatccgccgcccgtccacacccgccgccagctcaccatggatgatgatatcgccgcgctcgtcgtcgacaacggctccggcatgtgcaaggccggcttcgcgggcgacgatgccccccgggccgtcttcccctccatcgtggggcgccccaggcaccagggcgtgatggtgggcatgggtcagaaggattcctatgtgggcgacgaggcccagagcaagagaggcatcctcaccctgaagtaccccatcgagcacggcatcgtcaccaactgggacgacatggagaaaatctggcaccacaccttctacaatgagctgcgtgtggctcccgaggagcaccccgtgctgctgaccgaggcccccctgaaccccaaggccaaccgcgagaagatgacccagatcatgtttgagaccttcaacaccccagccatgtacgttgctatccaggctgtgctatccctgtacgcctctggccgtaccactggcatcgtgatggactccggtgacggggtcacccacactgtgcccatctacgaggggtatgccctcccccatgccatcctgcgtctggacctggctggccgggacctgactgactacctcatgaagatcctcaccgagcgcggctacagcttcaccaccacggccgagcgggaaatcgtgcgtgacattaaggagaagctgtgctacgtcgccctggacttcgagcaanagatggccacggctgcttccagctcctccctgganaaaagctacnagctgcctgacggccagtcatcaccattggcaatgagcggttccgctgccctgaggactcttccagccttcnttctnggnatggagtcntgtggnatccacnaaantaccttcaatncntcatgaantgggannnganntccncaaaaacntn

SEQ ID NO: 7 - DNA, 1145 bp, Homo sapiens
  misc_feature (763)..(763): n is a, c, g, or t
  misc_feature (775)..(775): n is a, c, g, or t
  misc_feature (823)..(823): n is a, c, g, or t
  misc_feature (833)..(833): n is a, c, g, or t
  misc_feature (843)..(843): n is a, c, g, or t
  misc_feature (854)..(854): n is a, c, g, or t
  misc_feature (871)..(871): n is a, c, g, or t
  misc_feature (882)..(882): n is a, c, g, or t
  misc_feature (887)..(887): n is a, c, g, or t
  misc_feature (891)..(891): n is a, c, g, or t
  misc_feature (926)..(926): n is a, c, g, or t
  misc_feature (942)..(942): n is a, c, g, or t
  misc_feature (949)..(949): n is a, c, g, or t
  misc_feature (952)..(952): n is a, c, g, or t
  misc_feature (960)..(963): n is a, c, g, or t
  misc_feature (977)..(977): n is a, c, g, or t
  misc_feature (980)..(980): n is a, c, g, or t
  misc_feature (984)..(985): n is a, c, g, or t
  misc_feature (991)..(991): n is a, c, g, or t
  misc_feature (999)..(999): n is a, c, g, or t
  misc_feature (1007)..(1007): n is a, c, g, or t
  misc_feature (1010)..(1010): n is a, c, g, or t
  misc_feature (1028)..(1028): n is a, c, g, or t
  misc_feature (1031)..(1031): n is a, c, g, or t
  misc_feature (1046)..(1046): n is a, c, g, or t
  misc_feature (1048)..(1048): n is a, c, g, or t
  misc_feature (1050)..(1050): n is a, c, g, or t
  misc_feature (1055)..(1055): n is a, c, g, or t
  misc_feature (1060)..(1060): n is a, c, g, or t
  misc_feature (1064)..(1064): n is a, c, g, or t
  misc_feature (1068)..(1068): n is a, c, g, or t
  misc_feature (1075)..(1075): n is a, c, g, or t
  misc_feature (1094)..(1094): n is a, c, g, or t
  misc_feature (1119)..(1119): n is a, c, g, or t
  misc_feature (1125)..(1125): n is a, c, g, or t
  misc_feature (1135)..(1135): n is a, c, g, or t
ggctgccaactctcgcactctgttcttccgccgctccgccgtcgcgtttctctgccggtcgcaatggaagaagagatcgccgcgctggtcattgacaatggctccggcatgtgcaaagctggttttgctggggacgacgctccccgagccgtgtttccttccatcgtcgggcgccccagacaccagggcgtcatggtgggcatgggccagaaggactcctacgtgggcgacgaggcccagagcaagcgtggcatcctgaccctgaagtaccccattgagcatggcatcgtcaccaactgggacgacatggagaagatctggcaccacaccttctacaacgagctgcgcgtggccccggaggagcacccagtgctgctgaccgaggcccccctgaaccccaaggccaacagagagaagatgactcagattatgtttgagaccttcaacaccccggccatgtacgtggccatccaggccgtgctgtccctctacgcctctgggcgcaccactggcattgtcatggactctggagacggggtcacccacacggtgcccatctacgagggctacgccctcccccacgccatcctgcgtctggacctggctggccgggacctgaccgactacctcatgaagatcctcactgagcgaggctacagcttcaccaccacggccgagcgggaaaatcgtgcgcgacatcaaggagaagctgtgctacgtcgccctggacttcgagcaggagatggccaccgccgcatcctcntcttctctgganaaaacctacgagctgcccgatggccaggtcatcaccattggcaatgancggttccggngtccggaagncgctgttccancccttccttcctgggtnatggaatcttngcggnatcnaagaaaaccaccttcaactccattcatgaaagtgnggacgtggaaatccgnaaaaacntgnacccccannnnggtgctgtcggggnggnaccnncatgtnatccgggnctttgccnaanagatgcaaaaggaaaatnccnccctgggccccaccncntnaaaantaaanattntccnccccccnaaaaccaaaaacccggggnggaatggggggctcccatcttggcnccctgncccccttccncaaaatggat

SEQ ID NO: 8 - DNA, 1165 bp, Homo sapiens
  misc_feature (790)..(790): n is a, c, g, or t
  misc_feature (820)..(820): n is a, c, g, or t
  misc_feature (834)..(835): n is a, c, g, or t
  misc_feature (839)..(839): n is a, c, g, or t
  misc_feature (841)..(841): n is a, c, g, or t
  misc_feature (846)..(846): n is a, c, g, or t
  misc_feature (866)..(866): n is a, c, g, or t
  misc_feature (869)..(869): n is a, c, g, or t
  misc_feature (871)..(871): n is a, c, g, or t
  misc_feature (927)..(927): n is a, c, g, or t
  misc_feature (934)..(934): n is a, c, g, or t
  misc_feature (943)..(943): n is a, c, g, or t
  misc_feature (946)..(946): n is a, c, g, or t
  misc_feature (962)..(963): n is a, c, g, or t
  misc_feature (974)..(974): n is a, c, g, or t
  misc_feature (982)..(982): n is a, c, g, or t
  misc_feature (984)..(984): n is a, c, g, or t
  misc_feature (1001)..(1001): n is a, c, g, or t
  misc_feature (1010)..(1010): n is a, c, g, or t
  misc_feature (1019)..(1019): n is a, c, g, or t
  misc_feature (1025)..(1025): n is a, c, g, or t
  misc_feature (1038)..(1039): n is a, c, g, or t
  misc_feature (1050)..(1050): n is a, c, g, or t
  misc_feature (1057)..(1057): n is a, c, g, or t
  misc_feature (1061)..(1062): n is a, c, g, or t
  misc_feature (1071)..(1072): n is a, c, g, or t
  misc_feature (1077)..(1077): n is a, c, g, or t
  misc_feature (1084)..(1084): n is a, c, g, or t
  misc_feature (1089)..(1089): n is a, c, g, or t
  misc_feature (1098)..(1098): n is a, c, g, or t
  misc_feature (1104)..(1104): n is a, c, g, or t
  misc_feature (1106)..(1107): n is a, c, g, or t
  misc_feature (1109)..(1109): n is a, c, g, or t
  misc_feature (1137)..(1137): n is a, c, g, or t
  misc_feature (1139)..(1139): n is a, c, g, or t
  misc_feature (1148)..(1148): n is a, c, g, or t
  misc_feature (1152)..(1152): n is a, c, g, or t
  misc_feature (1161)..(1161): n is a, c, g, or t
gcagggtctccggtaggggaaggcactggatcgcctcccaagtggcagattggtgagcaggaatttgaagccctcatgcggatgctcgataatctgggctacagaactggctacccttatcgataccctgctctgagagagaagtctaaaaaatacagcgatgtggaggttcctgctagtgtcacaggttactcctttgctagtgacggtgattcgggcacttgctccccactcagacacagttttcagaagcagcagcgggagaagacaagatggctgaactctggccggggcgacgaagcttccgaggaagggcagaatggaagcagtcccaagtcgaagactaagtggactaaagaggatggacatagaacttccacctctgctgtccctaacctgtttgttccattgaacactaacccaaaagaggtccaggagatgaggaacaagatccgagagcagaatttacaggacattaagacggctggccctcagtcccaggttttgtgtggtgtagtgatggacaggagcctcgtccaggatgcacctctctctgactgtacggaaactatcgaagggctcgagcttacagagcagacctttagtcccgctaaatctctctcttttagaaagggagagctggtgacggcctccaaggccatcattgaaaaggagtaccagccccacgtcattgtgagcaccacgggccccaaccccttcaccacactcacagaccgtgagctggaggagtaccgcagggaggtggagaggaagcaaaagggctctgaanaaaatctggacgaggctagagaaccgaaangaaaagagtcctcnnaacnancctgnggttcccccacccgcctccnagnantcccatcaagctggaagaaccaggaaacggatgccctaaaaaagtacctgttaccntaacctngtgccgganccnaatactggaaaagaanntgatgctgccncctttaancnaactccccccgaatttntcccctgangaaacctcnaaaaancccggcttcccannttaaaaaaggngaaaaancccnnaacccccannccccntggaggnccctnatgggggcngccccnanncncccccaaacccaccccgggggtgaaaangngcccccccntttnaagaggggncccc

SEQ ID NO: 9 - DNA, 937 bp, Homo sapiens
  misc_feature (593)..(593): n is a, c, g, or t
  misc_feature (643)..(643): n is a, c, g, or t
  misc_feature (677)..(677): n is a, c, g, or t
  misc_feature (680)..(681): n is a, c, g, or t
  misc_feature (726)..(726): n is a, c, g, or t
  misc_feature (731)..(731): n is a, c, g, or t
  misc_feature (741)..(742): n is a, c, g, or t
  misc_feature (748)..(748): n is a, c, g, or t
  misc_feature (752)..(752): n is a, c, g, or t
  misc_feature (762)..(762): n is a, c, g, or t
  misc_feature (764)..(764): n is a, c, g, or t
  misc_feature (771)..(771): n is a, c, g, or t
  misc_feature (781)..(781): n is a, c, g, or t
  misc_feature (784)..(784): n is a, c, g, or t
  misc_feature (787)..(787): n is a, c, g, or t
  misc_feature (793)..(793): n is a, c, g, or t
  misc_feature (797)..(797): n is a, c, g, or t
  misc_feature (803)..(803): n is a, c, g, or t
  misc_feature (807)..(807): n is a, c, g, or t
  misc_feature (817)..(817): n is a, c, g, or t
  misc_feature (819)..(819): n is a, c, g, or t
  misc_feature (821)..(821): n is a, c, g, or t
  misc_feature (824)..(824): n is a, c, g, or t
  misc_feature (828)..(828): n is a, c, g, or t
  misc_feature (845)..(845): n is a, c, g, or t
  misc_feature (851)..(851): n is a, c, g, or t
  misc_feature (855)..(855): n is a, c, g, or t
  misc_feature (865)..(865): n is a, c, g, or t
  misc_feature (874)..(874): n is a, c, g, or t
  misc_feature (887)..(888): n is a, c, g, or t
  misc_feature (891)..(891): n is a, c, g, or t
  misc_feature (895)..(895): n is a, c, g, or t
  misc_feature (898)..(898): n is a, c, g, or t
  misc_feature (903)..(903): n is a, c, g, or t
  misc_feature (908)..(909): n is a, c, g, or t
  misc_feature (917)..(917): n is a, c, g, or t
  misc_feature (924)..(924): n is a, c, g, or t
  misc_feature (926)..(926): n is a, c, g, or t
gggaggacccacgggcgccgggccggaaggcagctggcagcaggcccaggccagcgggcgcccgcgttcatgttccgccaggagcagccgttggccgagggcagctttgcgcccatgggctccctgcagccggacgcgggcaacgcgagctggaacgggaccgaggcgccggggggcggcgcccgggccaccccttactccctgcaggtgacgctgacgctggtgtgcctggccggcctgctcatgctgctcaccgtgttcggcaacgtgctcgtcatcatcgccgtgttcacgagccgcgcgctcaaggcgccccaaaacctcttcctggtgtctctggcctcggccgacatcctggtggccacgctcgtcatccctttctcgctggccaacgaggtcatgggctactggtacttcggcaaggcttggtgcgagatctacctggcgctcgacgtgctcttctgcacgtcgtccatcgtgcacctgtgcgccatcagcctggaccgctactggtccatcacacaggccatcgagtacaacctgaagcgcagaggccgaaccgctgcccacccagctcaacggcgcccctggcnagcccgcgccggccgggccgcgcgacaccgacgcgctggacctggagganagctcgtcttccgaccacgccgagcggcctccanggnncccgcagatccgagcgcggtccccggggcaaaggcaaggcccgancgagncaggtgaaanncgggcnacancctgccgcgncncgggccngggggcaacnggnatnggaacnccgntgcaangccnggggaaaaancncntcngggntgccaaagccttcccgnttggcncggncggaaaaacnccaaaaaancgctttaagtttnntgnttgnccntggtnaatcnnaatgttcntgggggngnttgatttccct

SEQ ID NO: 10 - DNA, 1076 bp, Homo sapiens
  misc_feature (666)..(666): n is a, c, g, or t
  misc_feature (828)..(828): n is a, c, g, or t
  misc_feature (830)..(830): n is a, c, g, or t
  misc_feature (855)..(856): n is a, c, g, or t
  misc_feature (865)..(865): n is a, c, g, or t
  misc_feature (872)..(872): n is a, c, g, or t
  misc_feature (877)..(877): n is a, c, g, or t
  misc_feature (879)..(879): n is a, c, g, or t
  misc_feature (882)..(882): n is a, c, g, or t
  misc_feature (887)..(887): n is a, c, g, or t
  misc_feature (890)..(890): n is a, c, g, or t
  misc_feature (893)..(893): n is a, c, g, or t
  misc_feature (895)..(895): n is a, c, g, or t
  misc_feature (901)..(901): n is a, c, g, or t
  misc_feature (919)..(919): n is a, c, g, or t
  misc_feature (922)..(922): n is a, c, g, or t
  misc_feature (925)..(925): n is a, c, g, or t
  misc_feature (927)..(927): n is a, c, g, or t
  misc_feature (952)..(952): n is a, c, g, or t
  misc_feature (963)..(963): n is a, c, g, or t
  misc_feature (967)..(967): n is a, c, g, or t
  misc_feature (971)..(971): n is a, c, g, or t
  misc_feature (976)..(976): n is a, c, g, or t
  misc_feature (998)..(998): n is a, c, g, or t
  misc_feature (1003)..(1003): n is a, c, g, or t
  misc_feature (1005)..(1005): n is a, c, g, or t
  misc_feature (1018)..(1018): n is a, c, g, or t
  misc_feature (1030)..(1031): n is a, c, g, or t
  misc_feature (1033)..(1033): n is a, c, g, or t
  misc_feature (1042)..(1043): n is a, c, g, or t
  misc_feature (1066)..(1066): n is a, c, g, or t
  misc_feature (1071)..(1071): n is a, c, g, or t
gggaaggctgacacaggcaagatgtacgccatgaagtgcctggacaaaaagcgcatcaagatgaagcagggggagaccctggccctgaacgagcgcatcatgctctcgctcgtcagcactggggactgcccattcattgtctgcatgtcatacgcgttccacacgccagacaagctcagcttcatcctggacctcatgaacggtggggacctgcactaccacctctcccagcacggggtcttctcagaggctgacatgcgcttctatgcggccgagatcatcctgggcctggagcacatgcacaaccgcttcgtggtctaccgggacctgaagccagccaacatccttctggacgagcatggccacgtgcggatctcggacctgggcctggcctgtgacttctccaagaagaagccccatgccagcgtgggcacccacgggtacatggctccggaggtcctgcagaagggcgtggcctacgacagcagtgccgactggttctctctggggtgcatgctcttcaagttgctgcgggggcacagccccttccggcagcacaagaccaaagacaagcatgagatcgaccgcatgacgctgacgatggccgtggagctgcccgactccttctcccctgaactacgctccctgctggaggggttgctgcanagggatgtcaaccggagattgggctgcctgggccgaggggctcaggaggtgaaagagagcccctttttccgctccctggactggcagatggtcttcttgcaaaagtaccctcccccgctgatccccccacgaaggggaggtgaacgcggccgaaccccttcnanattggctcctttcgatgaggagganncaaaaggantcagttnctggnanagngattnagnaantntaccgnaaatttcccccctcaacnatnttngnaacgggtggcaaccagaaaggtggnaaaaaaatgtntttnaaancaatnaaaggcttaaaaaaaaacgggntgggngncccccaaaaaaancaaaaaaaaaanncntgggcccannaaaaaaaaaaaaaccccctgggnaaagnaacgg

SEQ ID NO: 11 - DNA, 1211 bp, Homo sapiens
  misc_feature (763)..(763): n is a, c, g, or t
  misc_feature (869)..(869): n is a, c, g, or t
  misc_feature (879)..(879): n is a, c, g, or t
  misc_feature (888)..(888): n is a, c, g, or t
  misc_feature (890)..(890): n is a, c, g, or t
  misc_feature (896)..(896): n is a, c, g, or t
  misc_feature (923)..(923): n is a, c, g, or t
  misc_feature (925)..(925): n is a, c, g, or t
  misc_feature (932)..(932): n is a, c, g, or t
  misc_feature (941)..(942): n is a, c, g, or t
  misc_feature (948)..(948): n is a, c, g, or t
  misc_feature (959)..(959): n is a, c, g, or t
  misc_feature (964)..(964): n is a, c, g, or t
  misc_feature (966)..(966): n is a, c, g, or t
  misc_feature (987)..(987): n is a, c, g, or t
  misc_feature (990)..(990): n is a, c, g, or t
  misc_feature (1002)..(1002): n is a, c, g, or t
  misc_feature (1009)..(1009): n is a, c, g, or t
  misc_feature (1013)..(1013): n is a, c, g, or t
  misc_feature (1018)..(1018): n is a, c, g, or t
  misc_feature (1027)..(1027): n is a, c, g, or t
  misc_feature (1036)..(1036): n is a, c, g, or t
  misc_feature (1052)..(1052): n is a, c, g, or t
  misc_feature (1059)..(1059): n is a, c, g, or t
  misc_feature (1067)..(1067): n is a, c, g, or t
  misc_feature (1082)..(1082): n is a, c, g, or t
  misc_feature (1088)..(1088): n is a, c, g, or t
  misc_feature (1104)..(1105): n is a, c, g, or t
  misc_feature (1114)..(1114): n is a, c, g, or t
  misc_feature (1128)..(1128): n is a, c, g, or t
  misc_feature (1132)..(1132): n is a, c, g, or t
  misc_feature (1143)..(1143): n is a, c, g, or t
  misc_feature (1146)..(1147): n is a, c, g, or t
  misc_feature (1156)..(1156): n is a, c, g, or t
  misc_feature (1159)..(1159): n is a, c, g, or t
  misc_feature (1166)..(1166): n is a, c, g, or t
  misc_feature (1180)..(1181): n is a, c, g, or t
  misc_feature (1188)..(1188): n is a, c, g, or t
  misc_feature (1194)..(1194): n is a, c, g, or t
  misc_feature (1198)..(1198): n is a, c, g, or t
  misc_feature (1202)..(1202): n is a, c, g, or t
  misc_feature (1204)..(1204): n is a, c, g, or t
ggaacactgcatagaaatgaatatggaatagcttccatattggattcttaccaatgtactgcagagataagtttagctgacctggctaccatattttttgcccagtttgttcaagaagccacttacaaggaagtaagcaaaatggtgaaagatgcattgactgcaattgagaaacccactggagatgaacagtcttcagggtgtttagaaaaccagctacctgcctttctggaagaactttgccatgagaaagaaattttggagaagtacggacattcagactgctgcagccaaagtgaagagggaagacataactgttttcttgcacacaaaaagcccactccagcatcgatcccacttttccaagttccagaacctgtcacaagctgtgaagcatatgaagaagacagggagacattcatgaacaaattcatttatgagatagcaagaaggcatcccttcctgtatgcacctacaattcttctttgggctgctcgctatgacaaaataattccatcttgctgcaaagctgaaaatgcagttgaatgcttccaaacaaaggcagcaacagttacaaaagaattaagagaaagcagcttgttaaatcaacatgcatgtgcagtaatgaaaaattttgggacccgaactttccaagccataactgttactaaactgagtcagaagtttaccaaagttaattttactgaaatccagaaactagtcctggatgtggcccatgtacatgagcactgttgcaaagganatgtgctggaattgtctgcaggatggggaaaaaaatcatgtcctacatatgttctcaacaagacactctgtcaaacaaaataacagaatgctgcaaactgaccacnctgggaacgnggtcaatgnanaattcntgccaaaaaatgatgaaaaacctgaangntctatcncccaaatcnnaaaacnggttttttagnaaaananaaatttttaaccatttttctnccnggggaaaaaaanatctttntggncaagnttttgttcntgaaaaatncaaaaaaaatttcccngcttggnggtccccngaaatttccaaaagntggccnaaggggaaccccgggnnttttttggnaaaaggttttcccnaaangaaaacccccnctnnaaggccccnaanaaggggnaaaaaaattttccnnaaattcntcccgnaaancccnancttggga

SEQ ID NO: 12 - DNA, 1008 bp, Homo sapiens
  misc_feature (702)..(702): n is a, c, g, or t
  misc_feature (707)..(707): n is a, c, g, or t
  misc_feature (818)..(818): n is a, c, g, or t
  misc_feature (821)..(821): n is a, c, g, or t
  misc_feature (824)..(824): n is a, c, g, or t
  misc_feature (827)..(827): n is a, c, g, or t
  misc_feature (833)..(833): n is a, c, g, or t
  misc_feature (837)..(837): n is a, c, g, or t
  misc_feature (840)..(840): n is a, c, g, or t
  misc_feature (847)..(848): n is a, c, g, or t
  misc_feature (879)..(879): n is a, c, g, or t
  misc_feature (881)..(881): n is a, c, g, or t
  misc_feature (889)..(889): n is a, c, g, or t
  misc_feature (891)..(891): n is a, c, g, or t
  misc_feature (900)..(900): n is a, c, g, or t
  misc_feature (907)..(907): n is a, c, g, or t
  misc_feature (909)..(909): n is a, c, g, or t
  misc_feature (920)..(920): n is a, c, g, or t
  misc_feature (925)..(925): n is a, c, g, or t
  misc_feature (948)..(948): n is a, c, g, or t
  misc_feature (951)..(951): n is a, c, g, or t
  misc_feature (954)..(954): n is a, c, g, or t
  misc_feature (981)..(981): n is a, c, g, or t
  misc_feature (984)..(984): n is a, c, g, or t
  misc_feature (991)..(991): n is a, c, g, or t
  misc_feature (998)..(999): n is a, c, g, or t
  misc_feature (1001)..(1001): n is a, c, g, or t
gaccagattgatgaagtaaaggtgtggcctcagcagccctccggagagctgtttgagattgaaatagacaccctggaaaccacctgccatgtgctggaccccacccctgtggcaagatgcagcgtgaggcagctgaaggagcatgctgtcgaaggagactgtgatttccagctgttgaaactagatggcaagttttccgtggtatacgcaaaatgtgattccagaacaacggctcagcttgtgcccctcccaccttctacctatgtggagtttacagtgtctggcactgactgtgttgctaaagaggccacagaggcagccaagtgtaacctgctggcagaaaagcaatatggcttttgtaaggcaacactcagtgagaagcttggtggggcagaggttgcagtgacctgcacggtgttccaaacacagcccgtgacctcacagccccaaccagaaggtgccaatgaagcagtccccacccccgtggtggacccagatgcacctccgtcccctccacttggcgcacctggactccctccagctggctcacccccagactcccatgtgttactggcagctcctccaggacaccagttgcaccgggcgcactacgacctgcgccacaccttcatgggtgtggtctcattggggtcaccctcaggagaagtgtcgcacccccggaaaacacgcacagtggtgcancctantgttggtgctgctgctgggccagtggttcctccatgtccggggaggatcaaacacttcaaggtctaggctaaacatggcaaaaatgaagaggtttggccacaaaaaaacantanccnccnattttntccnaancctgggnnatggggtggggggcccttgtctgctggcccncnccaagtgncncatggcgantctaaantnaaaaatcaagntcttngaactcccctaatttcccggtcnttnccnccaaggaaaaaaaacaaaaaggggggnggnggtttantgttttnnanaaaaagg

SEQ ID NO: 13 - DNA, 1087 bp, Homo sapiens
  misc_feature (839)..(839): n is a, c, g, or t
  misc_feature (867)..(867): n is a, c, g, or t
  misc_feature (901)..(901): n is a, c, g, or t
  misc_feature (906)..(906): n is a, c, g, or t
  misc_feature (924)..(924): n is a, c, g, or t
  misc_feature (935)..(935): n is a, c, g, or t
  misc_feature (940)..(940): n is a, c, g, or t
  misc_feature (959)..(959): n is a, c, g, or t
  misc_feature (964)..(965): n is a, c, g, or t
  misc_feature (985)..(985): n is a, c, g, or t
  misc_feature (991)..(991): n is a, c, g, or t
  misc_feature (999)..(999): n is a, c, g, or t
  misc_feature (1004)..(1004): n is a, c, g, or t
  misc_feature (1006)..(1006): n is a, c, g, or t
  misc_feature (1010)..(1010): n is a, c, g, or t
  misc_feature (1018)..(1018): n is a, c, g, or t
  misc_feature (1023)..(1023): n is a, c, g, or t
  misc_feature (1025)..(1025): n is a, c, g, or t
  misc_feature (1036)..(1037): n is a, c, g, or t
  misc_feature (1045)..(1045): n is a, c, g, or t
  misc_feature (1059)..(1059): n is a, c, g, or t
  misc_feature (1067)..(1068): n is a, c, g, or t
  misc_feature (1077)..(1077): n is a, c, g, or t
  misc_feature (1085)..(1085): n is a, c, g, or t
gccccacacgcctttggcacaatgaagtgggtaacctttatttcccttctttttctctttagctcggcttattccaggggtgtgtttcgtcgagatgcacacaagagtgaggttgctcatcggtttaaagatttgggagaagaaaatttcaaagccttggtgttgattgcctttgctcagtatcttcagcagtgtccatttgaagatcatgtaaaattagtgaatgaagtaactgaatttgcaaaaacatgtgttgctgatgagtcagctgaaaattgtgacaaatcacttcataccctttttggagacaaattatgcacagttgcaactcttcgtgaaacctatggtgaaatggctgactgctgtgcaaaacaagaacctgagagaaatgaatgcttcttgcaacacaaagatgacaacccaaacctcccccgattggtgagaccagaggttgatgtgatgtgcactgcttttcatgacaatgaagagacatttttgaaaaaatacttatatgaaattgccagaagacatccttacttttatgccccggaactccttttctttgctaaaaggtataaagctgcttttacagaatgttgccaagctgctgataaagctgcctgcctgttgccaaagctcgatgaacttcgggatgaagggaaggcttcgtctgccaaacagagactcaagtgtgccagtctccaaaaatttggagaaagagctttcaaagcatgggcagtagctcgcctgagccagaaatttcccaaagctgagtttgcagaagtttccaagttagtgacagatcttaccaaagtccacacgggaatgctgccatgganatctgcttgaatgtgctgatgacagggncggaaccttgccaagtatatctgtgaaaatcaanattcnatctccagtaaactgaangaatgctgggnaaaanccctggtggaaaaatcccnctgcnnttgcccaaatggaaaatgangaaaangcccgccngactngncctncataaacngccgnantttgttgaaannaaaggagntttgcaaaaactangctgaagnnaaggaggcntcccgggnca

SEQ ID NO: 14 - DNA, 1100 bp, Homo sapiens
  misc_feature (684)..(684): n is a, c, g, or t
  misc_feature (786)..(786): n is a, c, g, or t
  misc_feature (827)..(827): n is a, c, g, or t
  misc_feature (888)..(888): n is a, c, g, or t
  misc_feature (897)..(897): n is a, c, g, or t
  misc_feature (929)..(929): n is a, c, g, or t
  misc_feature (932)..(932): n is a, c, g, or t
  misc_feature (940)..(940): n is a, c, g, or t
  misc_feature (946)..(946): n is a, c, g, or t
  misc_feature (964)..(966): n is a, c, g, or t
  misc_feature (971)..(971): n is a, c, g, or t
  misc_feature (986)..(986): n is a, c, g, or t
  misc_feature (992)..(992): n is a, c, g, or t
  misc_feature (1008)..(1008): n is a, c, g, or t
  misc_feature (1014)..(1014): n is a, c, g, or t
  misc_feature (1018)..(1018): n is a, c, g, or t
  misc_feature (1036)..(1036): n is a, c, g, or t
  misc_feature (1046)..(1046): n is a, c, g, or t
  misc_feature (1049)..(1049): n is a, c, g, or t
  misc_feature (1057)..(1057): n is a, c, g, or t
  misc_feature (1060)..(1060): n is a, c, g, or t
  misc_feature (1062)..(1062): n is a, c, g, or t
  misc_feature (1064)..(1064): n is a, c, g, or t
  misc_feature (1067)..(1067): n is a, c, g, or t
  misc_feature (1074)..(1074): n is a, c, g, or t
  misc_feature (1083)..(1083): n is a, c, g, or t
  misc_feature (1086)..(1086): n is a, c, g, or t
  misc_feature (1090)..(1092): n is a, c, g, or t
  misc_feature (1096)..(1096): n is a, c, g, or t
ggtctggatttccaaggaagaatttcctctgaagcaccggaacttgctactaccagcaccatgccctaccaatatccagcactgaccccggagcagaagaaggagctgtctgacatcgctcaccgcatcgtggcacctggcaagggcatcctggctgcagatgagtccactgggagcattgccaagcggctgcagtccattggcaccgagaacaccgaggagaaccggcgcttctaccgccagctgctgctgacagctgacgaccgcgtgaacccctgcattgggggtgtcatcctcttccatgagacactctaccagaaggcggatgatgggcgtcccttcccccaagttatcaaatccaagggcggtgttgtgggcatcaaggtagacaagggcgtggtccccctggcagggacaaatggcgagactaccacccaagggttggatgggctgtctgagcgctgtgcccagtacaagaaggacggagctgacttcgccaagtggcgttgtgtgctgaagattggggaacacaccccctcagccctcgccatcatggaaaatgccaatgttctggcccgttatgccagtatctgccagcagaatggcattgtgcccatcgtggagcctgagatcctccctgatggggaccatgacttgaagcgctgccagtatgtgaccgagaangtgctggctgctgtctacaaggctctgagtgaccaccacatctacctggaaggcaccttgctgaagcccaacatggtcaccccaggccatgcttgcactcanaagttttctcatgaggaaattgcccatggcgaccgtcacancgctgcgccgcaagtgccccccgctgtcactgggatcaccttcctgtctggaggcccaaantgaggaagnaggcgtccatcaacctcaatgccattaaaaantgnccccctgnttgaanccctgggccctgaacttnnncttanggccgaaaccctggnaggccntttgcccttaaaggcntggggncggnaaaaaagaaaacttgaangcttgcccangangaaatatnttnangnaanccctggnccaaaaacnttncctnnnaagnaaaa

SEQ ID NO: 15 - DNA, 1225 bp, Homo sapiens
  misc_feature (833)..(833): n is a, c, g, or t
  misc_feature (837)..(837): n is a, c, g, or t
  misc_feature (846)..(846): n is a, c, g, or t
  misc_feature (860)..(860): n is a, c, g, or t
  misc_feature (890)..(890): n is a, c, g, or t
  misc_feature (893)..(893): n is a, c, g, or t
  misc_feature (900)..(900): n is a, c, g, or t
  misc_feature (908)..(908): n is a, c, g, or t
  misc_feature (915)..(915): n is a, c, g, or t
  misc_feature (923)..(923): n is a, c, g, or t
  misc_feature (934)..(934): n is a, c, g, or t
  misc_feature (946)..(946): n is a, c, g, or t
  misc_feature (953)..(953): n is a, c, g, or t
  misc_feature (964)..(964): n is a, c, g, or t
  misc_feature (966)..(966): n is a, c, g, or t
  misc_feature (977)..(977): n is a, c, g, or t
  misc_feature (981)..(981): n is a, c, g, or t
  misc_feature (1008)..(1008): n is a, c, g, or t
  misc_feature (1014)..(1014): n is a, c, g, or t
  misc_feature (1023)..(1023): n is a, c, g, or t
  misc_feature (1025)..(1025): n is a, c, g, or t
  misc_feature (1030)..(1030): n is a, c, g, or t
  misc_feature (1036)..(1036): n is a, c, g, or t
  misc_feature (1043)..(1043): n is a, c, g, or t
  misc_feature (1046)..(1046): n is a, c, g, or t
  misc_feature (1049)..(1049): n is a, c, g, or t
  misc_feature (1055)..(1055): n is a, c, g, or t
  misc_feature (1061)..(1061): n is a, c, g, or t
  misc_feature (1064)..(1064): n is a, c, g, or t
  misc_feature (1070)..(1070): n is a, c, g, or t
  misc_feature (1073)..(1073): n is a, c, g, or t
  misc_feature (1083)..(1083): n is a, c, g, or t
  misc_feature (1085)..(1085): n is a, c, g, or t
  misc_feature (1088)..(1088): n is a, c, g, or t
  misc_feature (1098)..(1098): n is a, c, g, or t
  misc_feature (1105)..(1107): n is a, c, g, or t
  misc_feature (1111)..(1111): n is a, c, g, or t
  misc_feature (1130)..(1130): n is a, c, g, or t
  misc_feature (1136)..(1136): n is a, c, g, or t
  misc_feature (1145)..(1145): n is a, c, g, or t
  misc_feature (1152)..(1152): n is a, c, g, or t
  misc_feature (1157)..(1158): n is a, c, g, or t
  misc_feature (1167)..(1168): n is a, c, g, or t
  misc_feature (1181)..(1181): n is a, c, g, or t
  misc_feature (1186)..(1186): n is a, c, g, or t
  misc_feature (1193)..(1193): n is a, c, g, or t
  misc_feature (1196)..(1196): n is a, c, g, or t
  misc_feature (1200)..(1200): n is a, c, g, or t
  misc_feature (1205)..(1205): n is a, c, g, or t
  misc_feature (1214)..(1214): n is a, c, g, or t
  misc_feature (1217)..(1217): n is a, c, g, or t
  misc_feature (1224)..(1224): n is a, c, g, or t
gcagagggcattctgaagccagctgaccgctcttttagccaaagtaaacttgaagttatcgaggaggagggaaaggtgggaccagatgaggacaagccaccttctaaaagttcttcatctgaaaagactcctgataagactgatcagaagtcaggggcccagttcttcacactggaaggcagacatcctgacagatcagtgtttcctgatacttacttcagttacaaagtagatgaagaatttgccactccttttaaaacagtagctaccaaaggtctagattttgacccttggtctaataaccgaggggatgatgaagtttttgacagtaaatcacgggaagatgaaactaagccatttgggctggcggtagaagaccgctctccagcaacaacccctgatacaacgccagccagaacgccaactgatgaaagtaccccaactagtgagcctaaccccttcccatttcatgaaggaaaaatgtttgagatgactcgcagtggtgcaattgacatgagcaagagggattttgttgaagagaggctccaatttttccagattggtgagcatacttctgaagggaagtcaggggaccagggggaaggggataaaagtatggtcactgccacaccacagccacagtcaggggacaccactgtagaaaccaatctagagagaaatgtagagacacctacagtggaacctaaccccagcatcccgaccagcggagagtgtcaggaaggcacatccagtagtggctccctggagaaatcagcagcagccactaacacctctaaagttgaccccaagttgcgcacgcctataaaatgggnattnctgcatccnccatgaccatgaanaaagaaggccctggaaaataacagataaanaanaagcggngatgaccngttgtcngggattanaaatggaactntaacaatgattncaatacngccaatacccnangggcgttaggncccntgaaaactgattttcaaaaaaaaaacntttaanaacaacacnanttggnattttnccctttnccnacngaaacntttggngtnaaaaanttnggaaaaaaantntgnccccccttgntccccannnaaanaaaaccccgggaagtttcncccggnaaaaaaaanggggttntcaanngccctttgnnaaaaaaaacaaanttttngggaaanccnaaanaaggnttttggggnttnggaaaanc

SEQ ID NO: 16 - DNA, 1065 bp, Homo sapiens
  misc_feature (784)..(784): n is a, c, g, or t
  misc_feature (800)..(800): n is a, c, g, or t
  misc_feature (843)..(843): n is a, c, g, or t
  misc_feature (861)..(861): n is a, c, g, or t
  misc_feature (866)..(866): n is a, c, g, or t
  misc_feature (902)..(902): n is a, c, g, or t
  misc_feature (904)..(904): n is a, c, g, or t
  misc_feature (906)..(906): n is a, c, g, or t
  misc_feature (909)..(909): n is a, c, g, or t
  misc_feature (913)..(913): n is a, c, g, or t
  misc_feature (916)..(916): n is a, c, g, or t
  misc_feature (918)..(918): n is a, c, g, or t
  misc_feature (922)..(922): n is a, c, g, or t
  misc_feature (924)..(924): n is a, c, g, or t
  misc_feature (932)..(932): n is a, c, g, or t
  misc_feature (936)..(936): n is a, c, g, or t
  misc_feature (948)..(948): n is a, c, g, or t
  misc_feature (952)..(952): n is a, c, g, or t
  misc_feature (957)..(957): n is a, c, g, or t
  misc_feature (961)..(961): n is a, c, g, or t
  misc_feature (988)..(988): n is a, c, g, or t
  misc_feature (996)..(997): n is a, c, g, or t
  misc_feature (1022)..(1022): n is a, c, g, or t
  misc_feature (1041)..(1041): n is a, c, g, or t
  misc_feature (1048)..(1048): n is a, c, g, or t
  misc_feature (1052)..(1054): n is a, c, g, or t
  misc_feature (1058)..(1058): n is a, c, g, or t
gcggacgcgtgggcggacgcgtgggtcctggccgggggcgtcgccgctgccgtctccaagaccgcggtcgcccccatcgagagggtcaaactgctgctgcaggtccagcatgccagcaaacagatcagtgctgagaagcagtacaaagggatcattgattgtgtggtgagaatccctaaggagcagggcttcctctccttctggaggggtaacctggccaacgtgatccgttacttccccacccaagctctcaacttcgccttcaaggacaagtacaagcagctcttcttagggggtgtggatcggcataagcagttctggcgctactttgctggtaacctggcgtccggtggggccgctggggccacctccctttgctttgtctacccgctggactttgctaggaccaggttggctgctgatgtgggcaagggcgccgcccagcgtgagttccatggtctgggcgactgtatcatcaagatcttcaagtctgatggcctgagggggctctaccagggtttcaacgtctctgtccaaggcatcattatctatagagctgcctacttcggagtctatgatactgccaaggggatgctgcctgaccccaagaacgtgcacatttttgtgagctggatgattgctcaaagtgtgacggcagtcgcagggctggtgtcctacccctttgacactgttcgtcgtaaaatgatgatgcagtccggccggaaaggggccgatattatgtacacggggacagttgactgctggaggaagattgcaaaagacnaaggagccaaggcctncttcaaaggtgcctggtccaatgtgctgaaaagcatgggcggngctttgtattggtgttgnatgangaaatcaaaaatatgtctaatgtaattaaaaacaantncncanattnacngngaantnatttaaanttcncaaatccattgngggnttaanaaantatcccaagggaaataaaaaatctggnaaaaaacnnactgaaaggaaacctcaaaaaaaangctttattgattgttcatnaaccccnattnnntttngaattaa

SEQ ID NO: 17 - DNA, 1153 bp, Homo sapiens
  misc_feature (816)..(816): n is a, c, g, or t
  misc_feature (861)..(861): n is a, c, g, or t
  misc_feature (877)..(877): n is a, c, g, or t
  misc_feature (923)..(923): n is a, c, g, or t
  misc_feature (931)..(931): n is a, c, g, or t
  misc_feature (937)..(937): n is a, c, g, or t
  misc_feature (945)..(945): n is a, c, g, or t
  misc_feature (969)..(969): n is a, c, g, or t
  misc_feature (983)..(983): n is a, c, g, or t
  misc_feature (988)..(988): n is a, c, g, or t
  misc_feature (993)..(993): n is a, c, g, or t
  misc_feature (997)..(997): n is a, c, g, or t
  misc_feature (1001)..(1001): n is a, c, g, or t
  misc_feature (1009)..(1009): n is a, c, g, or t
  misc_feature (1018)..(1018): n is a, c, g, or t
  misc_feature (1027)..(1027): n is a, c, g, or t
  misc_feature (1031)..(1031): n is a, c, g, or t
  misc_feature (1033)..(1033): n is a, c, g, or t
  misc_feature (1038)..(1038): n is a, c, g, or t
  misc_feature (1049)..(1049): n is a, c, g, or t
  misc_feature (1052)..(1052): n is a, c, g, or t
  misc_feature (1055)..(1055): n is a, c, g, or t
  misc_feature (1068)..(1069): n is a, c, g, or t
  misc_feature (1074)..(1074): n is a, c, g, or t
  misc_feature (1087)..(1087): n is a, c, g, or t
  misc_feature (1093)..(1093): n is a, c, g, or t
  misc_feature (1095)..(1095): n is a, c, g, or t
  misc_feature (1097)..(1097): n is a, c, g, or t
  misc_feature (1099)..(1099): n is a, c, g, or t
  misc_feature (1104)..(1104): n is a, c, g, or t
  misc_feature (1106)..(1106): n is a, c, g, or t
  misc_feature (1112)..(1112): n is a, c, g, or t
  misc_feature (1116)..(1116): n is a, c, g, or t
  misc_feature (1122)..(1122): n is a, c, g, or t
  misc_feature (1127)..(1127): n is a, c, g, or t
  misc_feature (1129)..(1129): n is a, c, g, or t
  misc_feature (1141)..(1141): n is a, c, g, or t
  misc_feature (1145)..(1145): n is a, c, g, or t
  misc_feature (1151)..(1151): n is a, c, g, or t
  misc_feature (1153)..(1153): n is a, c, g, or t
gcccacgcgtccgcggacgcgtggggcagcgccggagtcaaagccggttcccggcccagtcccgtcctgcagcagtctgcctcctctttcaacatgacagatgccgctgtgtccttcgccaaggacttcctggcaggtggagtggccgcagccatctccaagacggcggtagcgcccatcgagcgggtcaagctgctgctgcaggtgcagcatgccagcaagcagatcactgcagataagcaatacaaaggcattatagactgcgtggtccgtattcccaaggagcagggagttctgtccttctggcgcggtaacctggccaatgtcatcagatacttccccacccaggctcttaacttcgccttcaaagataaatacaagcagatcttcctgggtggtgtggacaagagaacccagttttggcgctactttgcagggaatctggcatcgggtggtgccgcaggggccacatccctgtgttttgtgtaccctcttgattttgcccgtacccgtctagcagctgatgtgggtaaagctggagctgaaagggaattccgaggcctcggtgactgcctggttaagatctacaaatctgatgggattaagggcctgtaccaaggctttaacgtgtctgtgcagggtattatcatctaccgagccgcctacttcggtatctatgacactgcaaagggaatgcttccggatcccaagaacactcacatcgtcatcagctggatgatcgcacagactgtcactgctgttgccgggttgacttcctatccatttgacaccgttcgccgccgcatgatgatgcantcagggcgcaaaggaactgacatcatgtacacaggcacgcttgantgctggcggaaaaatngctcgtgaatgaagaaagcaaactttttttcaagggggcatggtcnaatggttntcaaangcatgggngggggcttttgggcctggccttgnatgaagaaatccanaaatnacccntaantttntttcctangaatttttnccccctggnaaananggcanggttttatttnaanaanaaaatttttgaannatttnttgaaaaaaatcncggggngntnanttttncnaggggnaaantatttnagggntnaaaaagggaaanaaanaaattntn

SEQ ID NO: 18 - DNA, 986 bp, Homo sapiens
  misc_feature (763)..(763): n is a, c, g, or t
  misc_feature (769)..(769): n is a, c, g, or t
  misc_feature (796)..(796): n is a, c, g, or t
  misc_feature (818)..(818): n is a, c, g, or t
  misc_feature (830)..(830): n is a, c, g, or t
  misc_feature (855)..(855): n is a, c, g, or t
  misc_feature (858)..(858): n is a, c, g, or t
  misc_feature (864)..(864): n is a, c, g, or t
  misc_feature (866)..(866): n is a, c, g, or t
  misc_feature (869)..(869): n is a, c, g, or t
  misc_feature (874)..(874): n is a, c, g, or t
  misc_feature (879)..(879): n is a, c, g, or t
  misc_feature (911)..(911): n is a, c, g, or t
  misc_feature (916)..(916): n is a, c, g, or t
  misc_feature (925)..(926): n is a, c, g, or t
  misc_feature (929)..(929): n is a, c, g, or t
  misc_feature (933)..(934): n is a, c, g, or t
  misc_feature (946)..(947): n is a, c, g, or t
  misc_feature (951)..(951): n is a, c, g, or t
  misc_feature (954)..(954): n is a, c, g, or t
  misc_feature (972)..(972): n is a, c, g, or t
  misc_feature (976)..(976): n is a, c, g, or t
ggcgacgccctccattcactctccgcgcccgttctccggctgtcctcccgttccgctgcccgccctgccaccatgacggaacaggccatctccttcgccaaagacttcttggccggaggcatcgccgccgccatctccaagacggccgtggctccgatcgagcgggtcaagctgctgctgcaggtccagcacgccagcaagcagatcgccgccgacaagcagtacaagggcatcgtggactgcattgtccgcatccccaaggagcagggcgtgctgtccttctggaggggcaaccttgccaacgtcattcgctacttccccactcaagccctcaacttcgccttcaaggataagtacaagcagatcttcctggggggcgtggacaagcacacgcagttctggaggtactttgcgggcaacctggcctccggcggtgcggccggcgcgacctccctctgcttcgtgtacccgctggatttcgccagaacccgcctggcagcggacgtgggaaagtcaggcacagagcgcgagttccgaggcctgggagactgcctggtgaagatcaccaagtccgacggcatccggggcctgtaccagggcttcagtgtctccgtgcagggcatcatcatctaccgggcggcctacttcggcgtgtacgatacggccaagggcatgctccccgaccccaagaacacgcacatcgtggtgagctggatgatcgcgcaaaccgtgacggccgtggccggcgtggtgtcctaccccnttcganacggtgcggcggcgcatgatgatgcantccgggcgcaaaagaaactganatcatgtacacngggcaccgtcgaatgttggaagaanatnttaaananganggggnaaggncttcttcaagggtgcgtggtccaacgtcctgnggggnatggggggnnccnttcnnggctggtcctgnnaaanaanttcaaaaaggggattaangggncgggggcttc

SEQ ID NO: 19 - DNA, 1221 bp, Homo sapiens
  misc_feature (768)..(768): n is a, c, g, or t
  misc_feature (803)..(803): n is a, c, g, or t
  misc_feature (829)..(829): n is a, c, g, or t
  misc_feature (853)..(853): n is a, c, g, or t
  misc_feature (874)..(874): n is a, c, g, or t
  misc_feature (889)..(890): n is a, c, g, or t
  misc_feature (914)..(914): n is a, c, g, or t
  misc_feature (929)..(929): n is a, c, g, or t
  misc_feature (938)..(938): n is a, c, g, or t
  misc_feature (948)..(948): n is a, c, g, or t
  misc_feature (963)..(963): n is a, c, g, or t
  misc_feature (986)..(986): n is a, c, g, or t
  misc_feature (988)..(988): n is a, c, g, or t
  misc_feature (1004)..(1004): n is a, c, g, or t
  misc_feature (1007)..(1007): n is a, c, g, or t
  misc_feature (1021)..(1021): n is a, c, g, or t
  misc_feature (1026)..(1027): n is a, c, g, or t
  misc_feature (1034)..(1035): n is a, c, g, or t
  misc_feature (1039)..(1039): n is a, c, g, or t
  misc_feature (1050)..(1050): n is a, c, g, or t
  misc_feature (1057)..(1057): n is a, c, g, or t
  misc_feature (1062)..(1062): n is a, c, g, or t
  misc_feature (1077)..(1077): n is a, c, g, or t
  misc_feature (1082)..(1082): n is a, c, g, or t
  misc_feature (1087)..(1087): n is a, c, g, or t
  misc_feature (1089)..(1089): n is a, c, g, or t
  misc_feature (1098)..(1098): n is a, c, g, or t
  misc_feature (1102)..(1103): n is a, c, g, or t
  misc_feature (1113)..(1113): n is a, c, g, or t
  misc_feature (1121)..(1121): n is a, c, g, or t
  misc_feature (1123)..(1123): n is a, c, g, or t
  misc_feature (1136)..(1136): n is a, c, g, or t
  misc_feature (1138)..(1138): n is a, c, g, or t
  misc_feature (1140)..(1140): n is a, c, g, or t
  misc_feature (1144)..(1144): n is a, c, g, or t
  misc_feature (1150)..(1150): n is a, c, g, or t
  misc_feature (1155)..(1155): n is a, c, g, or t
  misc_feature (1164)..(1165): n is a, c, g, or t
  misc_feature (1178)..(1178): n is a, c, g, or t
  misc_feature (1183)..(1183): n is a, c, g, or t
  misc_feature (1187)..(1187): n is a, c, g, or t
  misc_feature (1198)..(1198): n is a, c, g, or t
  misc_feature (1209)..(1209): n is a, c, g, or t
  misc_feature (1211)..(1211): n is a, c, g, or t
  misc_feature (1213)..(1213): n is a, c, g, or t
  misc_feature (1220)..(1220): n is a, c, g, or t
ggcctcctgtttggcatgcggaacagtgcagccagtgatgaggactcaagctgggctaccttatcccagggcagcccctcctatggctccccagaggacacagattccttctggaaccccaacgccttcgagacggattccgacctgccggctggatggatgagggtccaggacacctcagggacctattactggcacatcccaacagggaccacccagtgggaaccccccggccgggcctccccctcacaggggagcagcccccaagaggagtcccagctcacctggacaggttttgctcatggagaaggctttgaggatggagaattttggaaggatgaacccagtgatgaggccccaatggagctgggactgaaggaacctgaggaggggacgttgaccttcccagctcagagcctcagcccagagccgttgccccaagaggaggagaagcttcccccacggaataccaacccagggatcaagtgtttcgccgtgcgctccctaggctgggtagagatgaccgaggaggagctggcccctggacgcagcagtgtggcagtcaacaattgcatccgtcagctctcttaccacaaaaacaacctgcatgaccccatgtctgggggctggggggaaggaaaggatctgctactgcagctggaggatgagacactaaagctagtggagccacagagccaggcactgctgcacgcccaacccatcatcagcatccgcgtgtggggcgtcgggcgggacagtggaaaaganagggactttgcctacgtagctcgtgataagctganccagatgctcaagtgccacgtgtttnccctgtgaggcacctgccaaaaanatcgccaccagcctgcatganatctgctcttaaaannatggccgaaagggcgtaatgcccnctgcttggtaaatgnaattctccntggaaccctntaaacttgtggaagncccttttcaagtggaattcccancncctaaaaatgaattgntcnaaaattccaagtcnttacnngggaaannactnttgctaaactngtggggnaaaantaataagggggcctncaatnattcntntttcccaanaccnngaaaaaggancccaattngntagggggccctgntncntccnattttnccaanaaaaaaaannttttggaaaattnggggnttcntctttctggcnggggaaaaatncncnttttttnt

SEQ ID NO: 20 - DNA, 981 bp, Homo sapiens
  misc_feature (708)..(708): n is a, c, g, or t
  misc_feature (711)..(711): n is a, c, g, or t
  misc_feature (742)..(742): n is a, c, g, or t
  misc_feature (764)..(764): n is a, c, g, or t
  misc_feature (779)..(779): n is a, c, g, or t
  misc_feature (781)..(781): n is a, c, g, or t
  misc_feature (787)..(787): n is a, c, g, or t
  misc_feature (816)..(816): n is a, c, g, or t
  misc_feature (835)..(835): n is a, c, g, or t
  misc_feature (842)..(842): n is a, c, g, or t
  misc_feature (846)..(846): n is a, c, g, or t
  misc_feature (859)..(859): n is a, c, g, or t
  misc_feature (863)..(864): n is a, c, g, or t
  misc_feature (881)..(881): n is a, c, g, or t
  misc_feature (885)..(886): n is a, c, g, or t
  misc_feature (892)..(892): n is a, c, g, or t
  misc_feature (895)..(895): n is a, c, g, or t
  misc_feature (918)..(918): n is a, c, g, or t
  misc_feature (925)..(925): n is a, c, g, or t
  misc_feature (927)..(927): n is a, c, g, or t
  misc_feature (931)..(931): n is a, c, g, or t
  misc_feature (937)..(937): n is a, c, g, or t
  misc_feature (946)..(946): n is a, c, g, or t
  misc_feature (954)..(954): n is a, c, g, or t
  misc_feature (956)..(956): n is a, c, g, or t
  misc_feature (958)..(958): n is a, c, g, or t
  misc_feature (968)..(969): n is a, c, g, or t
  misc_feature (972)..(972): n is a, c, g, or t
  misc_feature (974)..(974): n is a, c, g, or t
  misc_feature (976)..(976): n is a, c, g, or t
  misc_feature (980)..(980): n is a, c, g, or t
ggacatggggcccgccagccccgctgctcgcggtctaagtcgccgcccgggccagccgccgctgccgctgctgctgccactattgctgctgcttctgcgcgcgcagcccgccatcgggagcctggccggtgggagccccggcgcggccgaggccccggggtcggcccaggtggctggactatgcgggcgcctaacccttcaccgggacctgcgcaccggccgctgggaaccagacccacagcgctctcgacgctgtctccgggacccgcagcgcgtgctggagtactgcagacagatgtacccggagctgcagattgcacgtgtggagcaggctacgcaggccatccccatggagcgctggtgcgggggttcccggagcggcagctgcgcccacccccaccaccaggttgtgcccttccgctgcctgcctggtgaatttgtgagtgaggccctgctggtgcctgaaggctgccggttcttgcaccaggagcgcatggaccaatgtgagagttcaacccggaggcatcaggaggcacaggaggcctgcagctcccagggcctcatcctgcacggctcgggcatgctcttaccctgtggctcggatcggttccgtggtgtggagtatgtgtgctgtccccctccagggacccccgacccatctgggacagcagttggtgacccctccacccggtcctggcccccggggancanagtaaaaggggctgaagacgaggaaaaggangaatccttcccacagccagtanatgattatttcgtgnancctccncaaggctgaaaaagaaaaagaaaacagtnccacccccaaacttcccanaaacttngcanttggtcggcaaantcannttccaccccaagcccanaaanngtggtnganatttaattttggcatgcctgggnaaatcantnacanaagggnttcttgaangcaaaaangnanttgaaaaaannaanantncccna

SEQ ID NO: 21 - DNA, 1173 bp, Homo sapiens
  misc_feature (728)..(728): n is a, c, g, or t
  misc_feature (785)..(785): n is a, c, g, or t
  misc_feature (788)..(788): n is a, c, g, or t
  misc_feature (791)..(791): n is a, c, g, or t
  misc_feature (824)..(824): n is a, c, g, or t
  misc_feature (841)..(841): n is a, c, g, or t
  misc_feature (882)..(882): n is a, c, g, or t
  misc_feature (915)..(915): n is a, c, g, or t
  misc_feature (928)..(928): n is a, c, g, or t
  misc_feature (931)..(931): n is a, c, g, or t
  misc_feature (937)..(937): n is a, c, g, or t
  misc_feature (942)..(942): n is a, c, g, or t
  misc_feature (947)..(948): n is a, c, g, or t
  misc_feature (964)..(964): n is a, c, g, or t
  misc_feature (971)..(971): n is a, c, g, or t
  misc_feature (996)..(996): n is a, c, g, or t
  misc_feature (999)..(999): n is a, c, g, or t
  misc_feature (1019)..(1019): n is a, c, g, or t
  misc_feature (1025)..(1025): n is a, c, g, or t
  misc_feature (1028)..(1029): n is a, c, g, or t
  misc_feature (1040)..(1040): n is a, c, g, or t
  misc_feature (1049)..(1049): n is a, c, g, or t
  misc_feature (1051)..(1051): n is a, c, g, or t
  misc_feature (1054)..(1054): n is a, c, g, or t
  misc_feature (1062)..(1062): n is a, c, g, or t
  misc_feature (1065)..(1065): n is a, c, g, or t
  misc_feature (1067)..(1067): n is a, c, g, or t
  misc_feature (1073)..(1073): n is a, c, g, or t
  misc_feature (1088)..(1088): n is a, c, g, or t
  misc_feature (1095)..(1095): n is a, c, g, or t
  misc_feature (1105)..(1105): n is a, c, g, or t
  misc_feature (1121)..(1121): n is a, c, g, or t
  misc_feature (1125)..(1125): n is a, c, g, or t
  misc_feature (1131)..(1131): n is a, c, g, or t
  misc_feature (1134)..(1134): n is a, c, g, or t
  misc_feature (1142)..(1142): n is a, c, g, or t
  misc_feature (1150)..(1151): n is a, c, g, or t
  misc_feature (1153)..(1153): n is a, c, g, or t
  misc_feature (1160)..(1164): n is a, c, g, or t
ggtcagagccgccatcttgtgggagcaaaaccaacgcctggctcggagcagcagcctctgaggtgtccctggccagtgtccttccacctgtccacaagcatggggaacatcttcgccaacctcttcaagggcctttttggcaaaaaagaaatgcgcatcctcatggtgggcctggatgctgcagggaagaccacgatcctctacaagcttaagctgggtgagatcgtgaccaccattcccaccataggcttcaacgtggaaaccgtggagtacaagaacatcagcttcactgtgtgggacgtgggtggccaggacaagatccggcccctgtggcgccactacttccagaacacacaaggcctgatcttcgtggtggacagcaatgacagagagcgtgtgaacgaggcccgtgaggagctcatgaggatgctggccgaggacgagctccgggatgctgtcctcctggtgttcgccaacaagcaggacctccccaacgccatgaatgcggccgagatcacagacaagctggggctgcactcactacgccacaggaactggtacattcaggccacctgcgccaccagcggcgacgggctctatgaaggactggactggctgtccaatcagctccggaaccagaagtgaacgcgacccccctccctctcactcctcttgccctctgctttactctcatgtggcaaacgtgcggctcgtggtgtgagtgccanaagctgcctccgtggtttggtcaccgtgtgcatcgcaccgtgctgtaaatgtggcanacncancctgcggccaggctttttatttaatgtaaatantttttgtttccaatgangcagtttctggtactcctatgcatattactcagcttttttnattgtaaaaaaaaatcactccctgttcatgctnaaagggatgtagnccntgggcncctgnctcannatcccttgttggaaancccgccnccccttggctttaaactgggtaaanccntttgggggtgggtttaaccnaacccnggnnttttaaaaaantaaaaaccnantcnaaaccttnaancnaaaggnaaccccccaacaaantttcatnacgcctgaanccatcccccccttttncccnggaaanaangggggggncccaaaannanattttcnnnnnaaaaacccc

SEQ ID NO: 22 - DNA, 1033 bp, Homo sapiens
  misc_feature (773)..(773): n is a, c, g, or t
  misc_feature (800)..(800): n is a, c, g, or t
  misc_feature (802)..(802): n is a, c, g, or t
  misc_feature (845)..(845): n is a, c, g, or t
  misc_feature (853)..(853): n is a, c, g, or t
  misc_feature (876)..(876): n is a, c, g, or t
  misc_feature (905)..(905): n is a, c, g, or t
  misc_feature (911)..(911): n is a, c, g, or t
  misc_feature (918)..(918): n is a, c, g, or t
  misc_feature (922)..(922): n is a, c, g, or t
  misc_feature (945)..(945): n is a, c, g, or t
  misc_feature (951)..(951): n is a, c, g, or t
  misc_feature (956)..(956): n is a, c, g, or t
  misc_feature (959)..(959): n is a, c, g, or t
  misc_feature (961)..(961): n is a, c, g, or t
  misc_feature (964)..(964): n is a, c, g, or t
  misc_feature (978)..(978): n is a, c, g, or t
  misc_feature (987)..(987): n is a, c, g, or t
  misc_feature (990)..(990): n is a, c, g, or t
  misc_feature (996)..(996): n is a, c, g, or t
  misc_feature (1003)..(1003): n is a, c, g, or t
  misc_feature (1006)..(1006): n is a, c, g, or t
  misc_feature (1014)..(1014): n is a, c, g, or t
  misc_feature (1023)..(1033): n is a, c, g, or t
gcccgcggccggccagttccagcccgcaccccgcgtcggtgcccgcgcccctccccgggccccgccatgggcctcaccgtgtccgcgctcttttcgcggatcttcgggaagaagcagatgcggattctcatggttggcttggatgcggctggcaagaccacaatcctgtacaaactgaagttgggggagattgtcaccaccatcccaaccataggcttcaatgtagaaacagtggaatataagaacatctgtttcacagtctgggacgtgggaggccaggacaagattcggcctttgtggcggcactacttccagaacactcagggcctcatctttgtggtggacagtaatgaccgggagcgggtccaagaatctgctgatgaactccagaagatgctgcaggaggacgagctgcgggatgcagtgctgctggtatttgccaacaagcaggacatgcccaacgccatgcccgtgagcgagctgactgacaagctggggctacagcacttacgcagccgcacgtggtatgtccaggccacctgtgccacccaaggcacaggtctgtacgatggtctggactggctgtcccacgagctgtcaaagcgctaaccagccaggggcaggcccctgatgcccggaagctcctgcgtgcatccccgggatgaccagactcccggactcctcaggcagtgccctttcctcccacttttcctcccccatagccacaggcctctgctcctgctcctgcctgcatgttctctctgttgttggancctggaacccttgctctctgggcacanangggtccactctcctgcctgctgggacctatggaaggggcttcntggccaangccccctcttccaaaagaaggancaaggatctgggtttccttttttttttcnggtttnggggganctcnaagggcccagtttgggaaggggnaagggnaaggnctncnggnggggcttaaaatgnggccctggnatnttgaanaaaaaanttngctggggnttcaaaaannnnnnnnnnn

SEQ ID NO: 23 - DNA, 980 bp, Homo sapiens
  misc_feature (754)..(754): n is a, c, g, or t
  misc_feature (759)..(759): n is a, c, g, or t
  misc_feature (767)..(767): n is a, c, g, or t
  misc_feature (770)..(770): n is a, c, g, or t
  misc_feature (785)..(785): n is a, c, g, or t
  misc_feature (801)..(801): n is a, c, g, or t
  misc_feature (804)..(804): n is a, c, g, or t
  misc_feature (820)..(820): n is a, c, g, or t
  misc_feature (829)..(829): n is a, c, g, or t
  misc_feature (831)..(831): n is a, c, g, or t
  misc_feature (855)..(855): n is a, c, g, or t
  misc_feature (870)..(870): n is a, c, g, or t
  misc_feature (880)..(880): n is a, c, g, or t
  misc_feature (882)..(882): n is a, c, g, or t
  misc_feature (898)..(898): n is a, c, g, or t
  misc_feature (901)..(901): n is a, c, g, or t
  misc_feature (905)..(905): n is a, c, g, or t
  misc_feature (914)..(914): n is a, c, g, or t
  misc_feature (919)..(919): n is a, c, g, or t
  misc_feature (932)..(933): n is a, c, g, or t
  misc_feature (938)..(939): n is a, c, g, or t
  misc_feature (942)..(942): n is a, c, g, or t
  misc_feature (953)..(953): n is a, c, g, or t
  misc_feature (957)..(957): n is a, c, g, or t
  misc_feature (967)..(968): n is a, c, g, or t
  misc_feature (971)..(971): n is a, c, g, or t
  misc_feature (974)..(974): n is a, c, g, or t
  misc_feature (976)..(976): n is a, c, g, or t
  misc_feature (978)..(978): n is a, c, g, or t
gacttgatgtcccccttcgacccgtcgggtttgggggctgaagaaagcctaggtctcttagatgattacctggaggtggccaagcacttcaaacctcatgggttctccagcgacaaggctaaggcgggctcctccgaatggctggctgtggatgggttggtcagtccctccaacaacagcaaggaggatgccttctccgggacagattggatgttggagaaaatggatttgaaggagttcgacttggatgccctgttgggtatagatgacctggaaaccatgccagatgaccttctgaccacgttggatgacacttgtgatctctttgcccccctagtccaggagactaataagcagcccccccagacggtgaacccaattggccatctcccagaaagtttaacaaaacccgaccaggttgcccccttcaccttcttacaacctcttcccctttccccaggggtcctgtcctccactccagatcattcctttagtttagagctgggcagtgaagtggatatcactgaaggagataggaagccagactacactgcttacgttgccatgatccctcagtgcataaaggaggaagacaccccttcagataatgatagtggcatctgtatgagcccagagtcctatctggggtctcctcagcacagcccctctaccaggggctctccaaataggagcctcccatctccaggtgttctctgtgggtctgcccgtcccaaaacttacgatcctcctgganagaanatgggtancancaaaagtaaaggggngaaaaactggaataanaanctgaaaaaaaatggancaaaacaanancagcaacccactaaggtaccgccnaaaaaaaaaaagggncggaaaccangnaggctcttaactgggngangtgncaaaaaaanctggnaaaaaaaaaaaannaaggnnttntaaaaaaaaangggnggaattcccnnggnccnangnaa

SEQ ID NO: 24 - DNA, 1179 bp, Homo sapiens
  misc_feature (2)..(2): n is a, c, g, or t
  misc_feature (16)..(17): n is a, c, g, or t
  misc_feature (91)..(91): n is a, c, g, or t
  misc_feature (822)..(822): n is a, c, g, or t
  misc_feature (923)..(923): n is a, c, g, or t
  misc_feature (948)..(948): n is a, c, g, or t
  misc_feature (1014)..(1014): n is a, c, g, or t
  misc_feature (1028)..(1028): n is a, c, g, or t
  misc_feature (1040)..(1040): n is a, c, g, or t
  misc_feature (1060)..(1060): n is a, c, g, or t
  misc_feature (1065)..(1065): n is a, c, g, or t
  misc_feature (1068)..(1068): n is a, c, g, or t
  misc_feature (1081)..(1081): n is a, c, g, or t
  misc_feature (1084)..(1084): n is a, c, g, or t
  misc_feature (1095)..(1095): n is a, c, g, or t
  misc_feature (1098)..(1098): n is a, c, g, or t
  misc_feature (1106)..(1106): n is a, c, g, or t
  misc_feature (1110)..(1110): n is a, c, g, or t
  misc_feature (1122)..(1122): n is a, c, g, or t
  misc_feature (1127)..(1127): n is a, c, g, or t
  misc_feature (1132)..(1132): n is a, c, g, or t
  misc_feature (1150)..(1150): n is a, c, g, or t
  misc_feature (1155)..(1155): n is a, c, g, or t
  misc_feature (1172)..(1172): n is a, c, g, or t
tngaggaaaattactnngagagggatgcattcaccatcaccatcacggatcctatttagggtgacactatagaatcgtcgacccacgccgntccgaggagtttcgtgtggaacccgaggacgcaccagtttatgggccgcaccgggaccagctgggcctttatcctcctcttctacctcgttttttatgggttcctcaccgccatgttcaccctcaccatgtgggtgatgctgcagactgtctccgaccatacccccaagtaccaggaccgactggccacaccgggcttgatgattcgccccaagactgagaaccttgatgtcattgtcaatgtcagtgacactgaaagctgggaccagcatgttcagaagctcaacaagttcttggagccttacaacgactctatccaagcccaaaagaatgatgtctgccgccctgggcgctattactaacagccagataatggagtcctcaactaccccaaacgtgcctgccaattcaaccggacccagctgggcaactgctccggcattggggactccacccactatggttacagcactgggcagccctgtgtcttcatcaagatgaaccgggtcatcaacttctatgcaggagcaaaccagagcatgaatgttacctgtgctgggaagcgagatgaagatgctgagaatctcggcaacttcgtcatgttccccgccaacggcaacatcgacctcatgtacttcccctactatggcaaaaagttccacgtgaactacacacagcccctggtggctgtgaagttcctgaatgtgacccccaacgtggaggtgaatgtanaatgtcgcatcaacgccgccaacatcgccacagacgatgagcgagacaagttcgccggccgcgtggccttcaaactccgcatcaacaaaacctgaggcccnttcctcccacccatctctctcctgnggatgctcctggaatgtcctgacctgcctgatcctccctcacccccccaaagtatttttgaaacanaactatgactgtcngaacctcaatcnttttcttgatttccacccanctgantcnatggggtccgtcntcnctttccacaanttncccaactnaatnaatcaaaagganctggntaaanggccaaaagaatagaacnttcanttcggttaactggaaanatccccc

SEQ ID NO: 25 - DNA, 1055 bp, Homo sapiens
  misc_feature (854)..(854): n is a, c, g, or t
  misc_feature (881)..(881): n is a, c, g, or t
  misc_feature (884)..(884): n is a, c, g, or t
  misc_feature (893)..(893): n is a, c, g, or t
  misc_feature (902)..(902): n is a, c, g, or t
  misc_feature (913)..(913): n is a, c, g, or t
  misc_feature (919)..(919): n is a, c, g, or t
  misc_feature (932)..(932): n is a, c, g, or t
  misc_feature (948)..(948): n is a, c, g, or t
  misc_feature (951)..(951): n is a, c, g, or t
  misc_feature (954)..(954): n is a, c, g, or t
  misc_feature (959)..(959): n is a, c, g, or t
  misc_feature (961)..(961): n is a, c, g, or t
  misc_feature (971)..(971): n is a, c, g, or t
  misc_feature (976)..(976): n is a, c, g, or t
  misc_feature (983)..(983): n is a, c, g, or t
  misc_feature (985)..(985): n is a, c, g, or t
  misc_feature (991)..(991): n is a, c, g, or t
  misc_feature (998)..(998): n is a, c, g, or t
  misc_feature (1000)..(1002): n is a, c, g, or t
  misc_feature (1023)..(1023): n is a, c, g, or t
  misc_feature (1025)..(1025): n is a, c, g, or t
  misc_feature (1029)..(1029): n is a, c, g, or t
  misc_feature (1037)..(1037): n is a, c, g, or t
  misc_feature (1047)..(1047): n is a, c, g, or t
  misc_feature (1049)..(1049): n is a, c, g, or t
  misc_feature (1053)..(1055): n is a, c, g, or t
ggatccactgttgcccagttggtgaagagacttacagatgcagatgccatgaagtacaccattgtggtgtcggctacggcctcggatgctgccccacttcagtacctggctccttactctggctgttccatgggagagtattttagagacaatggcaaacatgctttgatcatctatgacgacttatccaaacaggctgttgcttaccgtcagatgtctctgttgctccgccgaccccctggtcgtgaggcctatcctggtgatgtgttctacctacactcccggttgctggagagagcagccaaaatgaacgatgcttttggtggtggctccttgactgctttgccagtcatagaaacacaggctggtgacgtgtctgcttacattccaacaaatgtcatttccatcactgacggacagatcttcttggaaacagaattgttctacaaaggtatccgccctgcaattaacgttggtctgtctgtatctcgtgtcggatccgctgcccaaaccagggctatgaagcaggtagcaggtaccatgaagctggaattggctcagtatcgtgaggttgctgcttttgcccagttcggttctgacctcgatgctgccactcaacaacttttgagtcgtggcgtgcgtctaactgagttgctgaagcaaggacagtattctcccatggctattgaagaacaagtggctgttatctatgcgggtgtaaggggatatcttgataaactggagcccagcaagattacaaagtttgaaaatgctttcttgtctcatgtcgtcagccagcaccaagccttgttgggcactatcagggctgatggaaaagatctcaaaacaatcanatgcaaagctgaaagaattgtaacaanttncttggctgnatttgaacntaaactcctgngaatcncatcaaaaaccanttcagttttgtcatgntcnaanaaatnanttccatttgnaaaanggttacncncaaacnccttatnannnaaatcccctgaaaaaaaaaangntccntaatgccnaaaaaaaaananaaannn

SEQ ID NO: 26 - DNA, 1085 bp, Homo sapiens
  misc_feature (860)..(860): n is a, c, g, or t
  misc_feature (910)..(910): n is a, c, g, or t
  misc_feature (912)..(912): n is a, c, g, or t
  misc_feature (933)..(933): n is a, c, g, or t
  misc_feature (940)..(940): n is a, c, g, or t
  misc_feature (942)..(942): n is a, c, g, or t
  misc_feature (947)..(947): n is a, c, g, or t
  misc_feature (964)..(964): n is a, c, g, or t
  misc_feature (982)..(982): n is a, c, g, or t
  misc_feature (984)..(984): n is a, c, g, or t
  misc_feature (987)..(987): n is a, c, g, or t
  misc_feature (997)..(997): n is a, c, g, or t
  misc_feature (1018)..(1018): n is a, c, g, or t
  misc_feature (1022)..(1022): n is a, c, g, or t
  misc_feature (1039)..(1039): n is a, c, g, or t
  misc_feature (1043)..(1043): n is a, c, g, or t
  misc_feature (1054)..(1054): n is a, c, g, or t
  misc_feature (1060)..(1060): n is a, c, g, or t
  misc_feature (1073)..(1073): n is a, c, g, or t
  misc_feature (1075)..(1075): n is a, c, g, or t
  misc_feature (1084)..(1085): n is a, c, g, or t
gcggactacgccatgttggggtttgtgggtcgggtggccgctgctccggcctccggggccttgcggagactcaccccttcagcgtcgctgcccccagctcagctcttactgcgggccgctccgacggcggtccatcctgtcagggactatgcggcgcaaacatctccttcgccaaaagcaggcgccgccaccgggcgcatcgtggcggtcattggcgcagtggtggacgtccagtttgatgagggactaccaccaattctaaatgccctggaagtgcaaggcagggagaccagactggttttggaggtggcccagcatttgggtgagagcacagtaaggactattgctatggatggtacagaaggcttggttagaggccagaaagtactggattctggtgcaccaatcaaaattcctgttggtcctgagactttgggcagaatcatgaatgtcattggagaacctattgatgaaagaggtcccatcaaaaccaaacaatttgctcccattcatgctgaggctccagagttcatggaaatgagtgttgagcaggaaattctggtgactggtatcaaggttgtcgatctgctagctccctatgccaagggtggcaaaattgggctttttggtggtgctggagttggcaagactgtactgatcatggagttaatcaacaatgtcgccaaagcccatggtggttactctgtgtttgctggtgttggtgagaggacccgtgaaggcaatgatttataccatgaaatgattgaatctggtgttatcaacttaaaagatgccacctctaaggtagcgctggtatatggtcaaatgaatgaaccacctggtgctcgtgccccgggtanctctgactgggctgactgtggctgaatacttcaaaaacaaaaaggtcaanangtactgctatttattgaaaanatctttncncttcncccaggctggttcaaangggtctgcattattgggncnaantcccttttgntgggggctatcaaccctaccntggnccctgaaatgggtactntgcnggaaaaaattncccctncccaaaagggatntntccccctgnn

SEQ ID NO: 27 - DNA, 904 bp, Homo sapiens
  misc_feature (624)..(624): n is a, c, g, or t
  misc_feature (627)..(627): n is a, c, g, or t
  misc_feature (629)..(629): n is a, c, g, or t
  misc_feature (635)..(635): n is a, c, g, or t
  misc_feature (638)..(639): n is a, c, g, or t
  misc_feature (641)..(641): n is a, c, g, or t
  misc_feature (646)..(647): n is a, c, g, or t
  misc_feature (673)..(673): n is a, c, g, or t
  misc_feature (678)..(678): n is a, c, g, or t
  misc_feature (681)..(681): n is a, c, g, or t
  misc_feature (684)..(684): n is a, c, g, or t
  misc_feature (688)..(688): n is a, c, g, or t
  misc_feature (701)..(701): n is a, c, g, or t
  misc_feature (707)..(707): n is a, c, g, or t
  misc_feature (715)..(715): n is a, c, g, or t
  misc_feature (720)..(720): n is a, c, g, or t
  misc_feature (723)..(723): n is a, c, g, or t
  misc_feature (734)..(735): n is a, c, g, or t
  misc_feature (744)..(744): n is a, c, g, or t
  misc_feature (760)..(760): n is a, c, g, or t
  misc_feature (764)..(764): n is a, c, g, or t
  misc_feature (776)..(776): n is a, c, g, or t
  misc_feature (779)..(780): n is a, c, g, or t
  misc_feature (797)..(797): n is a, c, g, or t
  misc_feature (799)..(799): n is a, c, g, or t
  misc_feature (805)..(805): n is a, c, g, or t
  misc_feature (821)..(821): n is a, c, g, or t
  misc_feature (826)..(826): n is a, c, g, or t
  misc_feature (828)..(828): n is a, c, g, or t
  misc_feature (831)..(831): n is a, c, g, or t
  misc_feature (838)..(838): n is a, c, g, or t
  misc_feature (848)..(848): n is a, c, g, or t
  misc_feature (851)..(852): n is a, c, g, or t
  misc_feature (857)..(857): n is a, c, g, or t
  misc_feature (867)..(867): n is a, c, g, or t
  misc_feature (878)..(878): n is a, c, g, or t
  misc_feature (889)..(889): n is a, c, g, or t
gcccacgcgtccgagcagctctcctgccacagctcctcaccccctgaaaatgttcgcctgctccaagtttgtctccactccctccttggtcaagagcacctcacagctgctgagccgtccgctatctgcagtggtgctgaaacgaccggagatactgacagatgagagcctcagcagcttggcagtctcatgtccccttacctcacttgtctctagccgcagcttccaaaccagcgccatttcaagggacatcgacacagcagccaagttcattggagctggggctgccacagttggggtggctggttctggggctgggattggaactgtgtttgggagcctcatcattggttatgccaggaacccttctctgaagcaacagctcttctcctacgccattctgggctttgccctctcggaggccatggggctcttttgtctgatggtagcctttctcatcctctttgccatgtgaaggagccgtctccacctcccatagttctcccgcgtctggttggccccgtgtgttccttttcctatacctccccaggcagcctggggaacgtggttggctcagggtttgacagagaaaagacaaataaatactgtattaataagaaaaanaancntaaaanacnntnaaaannaaaaaaagggcggccgcttcccctanaatgnagncgnaatnaagcttaattaancctgancttggacncctgnttnataaaatccannaaatgaccntcaaaaactccatctnggantttgttcaaaancgnncggttgccccccggggngntttttnattgggagaaaaaatnccaancnaancttggcnaaaaattttnaannaaccnaagggaagcnaaaaatggganaaaaaaaaacnctggaaaaaaccacc

SEQ ID NO: 28 - DNA, 941 bp, Homo sapiens
  misc_feature (654)..(654): n is a, c, g, or t
  misc_feature (705)..(705): n is a, c, g, or t
  misc_feature (710)..(710): n is a, c, g, or t
  misc_feature (752)..(752): n is a, c, g, or t
  misc_feature (754)..(754): n is a, c, g, or t
  misc_feature (764)..(764): n is a, c, g, or t
  misc_feature (766)..(767): n is a, c, g, or t
  misc_feature (772)..(772): n is a, c, g, or t
  misc_feature (779)..(780): n is a, c, g, or t
  misc_feature (785)..(785): n is a, c, g, or t
  misc_feature (790)..(790): n is a, c, g, or t
  misc_feature (795)..(795): n is a, c, g, or t
  misc_feature (811)..(811): n is a, c, g, or t
  misc_feature (813)..(813): n is a, c, g, or t
  misc_feature (820)..(820): n is a, c, g, or t
  misc_feature (824)..(824): n is a, c, g, or t
  misc_feature (840)..(840): n is a, c, g, or t
  misc_feature (850)..(850): n is a, c, g, or t
  misc_feature (855)..(855): n is a, c, g, or t
  misc_feature (858)..(858): n is a, c, g, or t
  misc_feature (865)..(865): n is a, c, g, or t
  misc_feature (882)..(882): n is a, c, g, or t
  misc_feature (888)..(888): n is a, c, g, or t
  misc_feature (892)..(892): n is a, c, g, or t
  misc_feature (912)..(912): n is a, c, g, or t
  misc_feature (918)..(919): n is a, c, g, or t
  misc_feature (922)..(922): n is a, c, g, or t
  misc_feature (926)..(926): n is a, c, g, or t
  misc_feature (928)..(928): n is a, c, g, or t
  misc_feature (933)..(933): n is a, c, g, or t
ggacgggccggatcgccttcgccgccgcccgcccgcaaaccttcgtgcccggcccgtcctcgcccccgcctccgccaccgcctcggcccgcagagcttgccccctccccacccgcagacatgtccgagtccaagagcggccccgagtatgcttcgtttttcgccgtcatgggcgcctcggccgccatggtcttcagcgccctgggcgctgcctatggcacagccaagagcggtaccggcattgcggccatgtctgtcatgcggccggagcagatcatgaagtccatcatcccagtggtcatggctggcatcatcgccatctacggcctggtggtggcagtcctcatcgccaactccctgaatgacgacatcagcctctacaagagcttcctccagctgggcgccggcctgagcgtgggcctgagcggcctggcagccggctttgccatcggcatcgtgggggacgctggcgtgcggggcaccgcccagcagccccgactattcgtgggcatgatcctgattctcatcttcgccgaggtgctcggcctctacggtctcatcgtcgccctcatcctctccacaaagtagaccctctccgagcccaccagccacagaatattatgtaaaagaaccaccccttcctcatttccagaangaacagcctgacacataacgcacggggccgccgccccccaaataattggtntttgnacatgcgcagtgtcctaatgcccatccttctgttttccccgncnttgcccccgncnnccccntgtcgtnnaaaanttggncccantaatcgcccctttcangncccgggncccnaccccctaaaatgctntgtgttatgngaaanaantaaaaangtcaatttttcttttantggaantttnatttataaaaaatttgggcntgtttnntgntttntngaaanggcctttt

SEQ ID NO: 29 - DNA, 1202 bp, Homo sapiens
  misc_feature (804)..(804): n is a, c, g, or t
  misc_feature (832)..(832): n is a, c, g, or t
  misc_feature (842)..(842): n is a, c, g, or t
  misc_feature (858)..(858): n is a, c, g, or t
  misc_feature (868)..(868): n is a, c, g, or t
  misc_feature (877)..(877): n is a, c, g, or t
  misc_feature (884)..(884): n is a, c, g, or t
  misc_feature (937)..(937): n is a, c, g, or t
  misc_feature (946)..(948): n is a, c, g, or t
  misc_feature (969)..(969): n is a, c, g, or t
  misc_feature (981)..(981): n is a, c, g, or t
  misc_feature (986)..(986): n is a, c, g, or t
  misc_feature (991)..(991): n is a, c, g, or t
  misc_feature (1003)..(1003): n is a, c, g, or t
  misc_feature (1006)..(1006): n is a, c, g, or t
  misc_feature (1024)..(1024): n is a, c, g, or t
  misc_feature (1028)..(1029): n is a, c, g, or t
  misc_feature (1039)..(1039): n is a, c, g, or t
  misc_feature (1045)..(1045): n is a, c, g, or t
  misc_feature (1050)..(1050): n is a, c, g, or t
  misc_feature (1069)..(1069): n is a, c, g, or t
  misc_feature (1081)..(1081): n is a, c, g, or t
  misc_feature (1091)..(1091): n is a, c, g, or t
  misc_feature (1097)..(1097): n is a, c, g, or t
  misc_feature (1101)..(1101): n is a, c, g, or t
  misc_feature (1106)..(1106): n is a, c, g, or t
  misc_feature (1110)..(1110): n is a, c, g, or t
  misc_feature (1129)..(1129): n is a, c, g, or t
  misc_feature (1141)..(1142): n is a, c, g, or t
  misc_feature (1151)..(1151): n is a, c, g, or t
  misc_feature (1153)..(1153): n is a, c, g, or t
  misc_feature (1171)..(1171): n is a, c, g, or t
  misc_feature (1180)..(1180): n is a, c, g, or t
  misc_feature (1182)..(1186): n is a, c, g, or t
  misc_feature (1189)..(1190): n is a, c, g, or t
  misc_feature (1192)..(1194): n is a, c, g, or t
  misc_feature (1196)..(1196): n is a, c, g, or t
  misc_feature (1198)..(1202): n is a, c, g, or t
gatcctaagcctaataaattgccaaaatctaagcaatcagagactgtggatcaaaattcagattctgatgaaatgctagcaatcctcaaagaggtgagcaggatgagtcacagttcttcttcagatactgatattaatgaaattcatacaaaccataagactttgtatgatttaaagactcaggcggggaaagatgataaaggaaaaaggaaacgaaaaagttctacatctggctcagattttgatactaaaaagggcaaatcagctaagagctctataatttctaaaaagaaacgacaaacccagtctgagtcttctaattatgactcagaattagaaaaagagataaagagcatgagtaaaattggtgctgccagaaccaccaaaaaaagaattccaaatacaaaagattttgactcttctgaagatgagaaacacagcaaaaaaggaatggataatcaagggcacaaaaatttgaagacctcacaagaaggatcatctgatgatgctgaaagaaaacaagagagagagactttctcttcagcagaaggcacagttgataaagacacgaccatcatggaattaagagatcgacttcctaagaagcagcaagcaagtgcttccactgatggtgtcgataagctttctgggaaagagcagagttttacttctttggaagttagaaaagttgctgaaactaaagaaaagagcaagcatctcaaaaccaaacatgtaaaaaaagtacaggatggcttatctgatattgcagagaaattcctaaaagaaaagaccagagcgatgaancttctgaagatgataaaaagccagagcnaaaagggganctggaagaaaaaaaanaaaccctccngactttaangaaaaangtaattaaaatggaaccaccgtatgaatcttcctctgaggccctgaaaagttncctgagcgnnnaaaaatttttccttttcctangggcttaaaacnaattnagaanggaccaccgggnggnaaaaaaaaagtaaaaatnagannataaacctcnaaaaanagggngaatttctgatttgccggnaaatccccgggnaagggaaatntttggncccncccangaanaaaaagcccgggacccccnaaacgggggttnnaaaaaaaananccccccggggcttggtcncaaaaaaanannnnnaanncnnnanannnnn

SEQ ID NO: 30 - DNA, 1034 bp, Homo sapiens
  misc_feature (141)..(141): n is a, c, g, or t
  misc_feature (384)..(384): n is a, c, g, or t
  misc_feature (462)..(462): n is a, c, g, or t
  misc_feature (505)..(505): n is a, c, g, or t
  misc_feature (517)..(517): n is a, c, g, or t
  misc_feature (544)..(544): n is a, c, g, or t
  misc_feature (558)..(558): n is a, c, g, or t
  misc_feature (566)..(566): n is a, c, g, or t
  misc_feature (624)..(624): n is a, c, g, or t
  misc_feature (639)..(639): n is a, c, g, or t
  misc_feature (644)..(644): n is a, c, g, or t
  misc_feature (656)..(656): n is a, c, g, or t
  misc_feature (661)..(661): n is a, c, g, or t
  misc_feature (674)..(675): n is a, c, g, or t
  misc_feature (688)..(688): n is a, c, g, or t
  misc_feature (696)..(697): n is a, c, g, or t
  misc_feature (736)..(737): n is a, c, g, or t
  misc_feature (752)..(752): n is a, c, g, or t
  misc_feature (754)..(754): n is a, c, g, or t
  misc_feature (770)..(770): n is a, c, g, or t
  misc_feature (791)..(791): n is a, c, g, or t
  misc_feature (795)..(795): n is a, c, g, or t
  misc_feature (798)..(798): n is a, c, g, or t
  misc_feature (808)..(809): n is a, c, g, or t
  misc_feature (817)..(818): n is a, c, g, or t
  misc_feature (820)..(822): n is a, c, g, or t
  misc_feature (838)..(838): n is a, c, g, or t
  misc_feature (842)..(842): n is a, c, g, or t
  misc_feature (851)..(851): n is a, c, g, or t
  misc_feature (857)..(857): n is a, c, g, or t
  misc_feature (865)..(866): n is a, c, g, or t
  misc_feature (879)..(879): n is a, c, g, or t
  misc_feature (885)..(885): n is a, c, g, or t
  misc_feature (894)..(895): n is a, c, g, or t
  misc_feature (900)..(900): n is a, c, g, or t
  misc_feature (910)..(910): n is a, c, g, or t
  misc_feature (915)..(915): n is a, c, g, or t
  misc_feature (917)..(917): n is a, c, g, or t
  misc_feature (925)..(925): n is a, c, g, or t
  misc_feature (933)..(933): n is a, c, g, or t
  misc_feature (941)..(941): n is a, c, g, or t
  misc_feature (950)..(951): n is a, c, g, or t
  misc_feature (958)..(959): n is a, c, g, or t
  misc_feature (961)..(961): n is a, c, g, or t
  misc_feature (963)..(963): n is a, c, g, or t
  misc_feature (974)..(974): n is a, c, g, or t
  misc_feature (976)..(976): n is a, c, g, or t
  misc_feature (984)..(984): n is a, c, g, or t
  misc_feature (987)..(987): n is a, c, g, or t
  misc_feature (999)..(999): n is a, c, g, or t
  misc_feature (1003)..(1003): n is a, c, g, or t
  misc_feature (1013)..(1014): n is a, c, g, or t
  misc_feature (1025)..(1026): n is a, c, g, or t
gggtttggttgtgagatcgagaataacagaagcagcggagcattctggaaatattactatgatggaaaggactacattgaattcaacaaagaaatcccagcctgggtccccttcgacccagcagcccagataaccaagcanaagtgggaggcagaaccagtctacgtgcagcgggccaaggcttacctggaggaggagtgccctgcgactctgcggaaatacctgaaatacagcaaaaatatcctggaccggcaagatcctccctctgtggtggtcaccagccaccaggccccaggagaaaagaagaaactgaagtgcctggcctacgacttctacccagggaaaattgatgtgcactggactcgggccggcgaggtgcaggancctgagttacggggagatgttcttcacaatggaaatggcacttaccagtcctgggtggtggtggcagtgcccccgcangacacagccccctactcctgccacgtgcagcacagcagcctgncccagcccctcntggtgccctgggaggccagctaggaancaagggttggaggnaatgtggnatctcaaacccagtaagctgcccttcctgcctgatgtgggagctgaaccacagaaatncacatgtcaatgganccacnaggccctgaagnagcantgtgggggggacnnaacaggaggttgnatttggannaccgaaagactgggatgcctgtcttgaagtataacttgnnacccaaaaaaaatcntntcacccttgagccccncccccaccccccttggtctantctngtnagaagctaannaaaataanncnnnccctcctttccctaancaanaaaaatgantaatanactaaaannttattttctactnagggcnggccccccnnccatnaaggagtccncaatnanatcttaantcaccttnatctttgncaccctgtnnaaaaaanncncnaaattgactcncnaacctccnttncgaattgttttnaaanactctcgttnngccccggcgtnnattttttt

SEQ ID NO: 31 - DNA, 942 bp, Homo sapiens
  misc_feature (606)..(606): n is a, c, g, or t
  misc_feature (666)..(666): n is a, c, g, or t
  misc_feature (700)..(700): n is a, c, g, or t
  misc_feature (743)..(743): n is a, c, g, or t
  misc_feature (752)..(752): n is a, c, g, or t
  misc_feature (768)..(768): n is a, c, g, or t
  misc_feature (775)..(775): n is a, c, g, or t
  misc_feature (784)..(784): n is a, c, g, or t
  misc_feature (787)..(787): n is a, c, g, or t
  misc_feature (800)..(800): n is a, c, g, or t
  misc_feature (810)..(810): n is a, c, g, or t
  misc_feature (812)..(812): n is a, c, g, or t
  misc_feature (821)..(821): n is a, c, g, or t
  misc_feature (833)..(833): n is a, c, g, or t
  misc_feature (838)..(839): n is a, c, g, or t
  misc_feature (843)..(843): n is a, c, g, or t
  misc_feature (851)..(851): n is a, c, g, or t
  misc_feature (857)..(858): n is a, c, g, or t
  misc_feature (868)..(868): n is a, c, g, or t
  misc_feature (876)..(876): n is a, c, g, or t
  misc_feature (888)..(888): n is a, c, g, or t
  misc_feature (892)..(892): n is a, c, g, or t
  misc_feature (909)..(909): n is a, c, g, or t
  misc_feature (912)..(912): n is a, c, g, or t
  misc_feature (917)..(918): n is a, c, g, or t
  misc_feature (920)..(921): n is a, c, g, or t
  misc_feature (926)..(926): n is a, c, g, or t
  misc_feature (936)..(937): n is a, c, g, or t
  misc_feature (939)..(939): n is a, c, g, or t
gcccacgcgtccgcccacgcgtccgcccacgcgtccgtcttctttctctcctccttttgctgggtgcttaccgaggcctggcagtcctacctggctgtcattgggcggatgcgcacccgcctcgttcgcaagcgcttcctctgcctgggctggggtctgcctgccctggtggtggccgtgtctgttggctttacccgaacgaaaggatacggtacatccagctactgctggctctccctggagggcggcctgctctacgcctttgtgggccctgcagccgtcattgtcctggtgaacatgctcatcggaatcatcgtcttcaacaagctcatggcacgtgatggcatctccgacaaatccaagaagcagagggccgggtcggagcggtgcccctgggccagcctgctcctcccctgctcagcgtgtggagcggtccccagccccctgctcagctcagcctcggccaggaacgccatggcctcactctggagctcctgcgtggtgctgcccctgctggcgctcacctggatgtctgccgtcctggctatgacagaccgccgttccgtcctcttccaggccctctttgctgtcttcaactccgcgcanggctttgtcatcactgctgtgcactgcttcctgcgccgagaggtccaggatgtggtgaantgccaaatgggggtgtgccgggctgatgaaaacnaaaaactcccctgactcgtgtaaaaaacgggcagctgcaaatnctgtcaaantttgaaaaggatgtgnatctggnttgtcaaanagngctgttcaaggangtcaaaactngnaaccgtcancatcaggggaanactanncccncctgtccntggaannaagaaaaaanaacccaantcctggcctcgngggnccctgaaaggaaacctnaanttttnnannattgnctgggaaaanncntgg

SEQ ID NO: 32 - DNA, 987 bp, Homo sapiens
  misc_feature (599)..(599): n is a, c, g, or t
  misc_feature (602)..(602): n is a, c, g, or t
  misc_feature (725)..(725): n is a, c, g, or t
  misc_feature (780)..(780): n is a, c, g, or t
  misc_feature (795)..(795): n is a, c, g, or t
  misc_feature (801)..(801): n is a, c, g, or t
  misc_feature (814)..(814): n is a, c, g, or t
  misc_feature (835)..(835): n is a, c, g, or t
  misc_feature (841)..(841): n is a, c, g, or t
  misc_feature (847)..(847): n is a, c, g, or t
  misc_feature (866)..(866): n is a, c, g, or t
  misc_feature (881)..(882): n is a, c, g, or t
  misc_feature (889)..(889): n is a, c, g, or t
  misc_feature (895)..(895): n is a, c, g, or t
  misc_feature (898)..(898): n is a, c, g, or t
  misc_feature (910)..(910): n is a, c, g, or t
  misc_feature (923)..(923): n is a, c, g, or t
  misc_feature (936)..(937): n is a, c, g, or t
  misc_feature (941)..(941): n is a, c, g, or t
  misc_feature (950)..(950): n is a, c, g, or t
  misc_feature (952)..(954): n is a, c, g, or t
  misc_feature (958)..(959): n is a, c, g, or t
  misc_feature (966)..(966): n is a, c, g, or t
  misc_feature (969)..(969): n is a, c, g, or t
  misc_feature (978)..(978): n is a, c, g, or t
  misc_feature (984)..(984): n is a, c, g, or t
gtgaaaccacagcctacgccctgctgcacctcctgcttcacgagggcaaagcagagatggcagaccaggctgcggcctggctcacccgtcagggcagcttccaagggggattccgcagtacccaagacacggtgattgccctggatgccctgtctgcctactggattgcctcccacaccactgaggagaggggtctcaatgtgactctcagctccacaggccggaatgggttcaagtcccacgcgctgcagctgaacaaccgccagattcgcggcctggaggaggagctgcagttttccttgggcagcaagatcaatgtgaaggtgggaggaaacagcaaaggaaccctgaaggtccttcgtacctacaatgtcctggacatgaagaacacgacctgccaggacctacagatagaagtgacagtcaaaggccacgtcgagtacacgatggaagcaaacgaggactatgaggactatgagtacgatgagcttccagccaaggatgacccagatgcccctctgcagcccgtgacacccctgcagctgtttgagggtcggaggaaccgccgcaggagggaggcgcccaaggtggtggaagancangagtccagggtgcactacaccgtgtgcatctggcggaacggcaaggtggggctgtctggcatggccatcgcggacgtcaccctcctgagtggattccacgccctgcgtgctgacctggaaaanctgacctccctctctgaccgttacgtgagtcactttgaaaccgaggggccccacntcctgctgtattttngactcnagcgcaaatgttntgtgttttacggggcaccaantaaaancaaaanttttggccaccttttgttntgctgaaatctgccnntgtgctnaagggnaantgccctccccancgtcccgccctgnaacggggtttgcnngaanaaggatggntnnnggannaaatttngcntgctactancccccnggg

SEQ ID NO: 33 - DNA, 902 bp, Homo sapiens
  misc_feature (729)..(729): n is a, c, g, or t
  misc_feature (756)..(756): n is a, c, g, or t
  misc_feature (873)..(873): n is a, c, g, or t
  misc_feature (880)..(902): n is a, c, g, or t
gacgagacggccaccatctcctacatcctcactctcactgatgaacagtttctggtgcaggatcagttcccagtgacgcccgtgagcacgctgtgtgcagaggccagggaaacggcgcggcggctgctgacccactacgtgaaggtgcagggcctggtcatatcacagatgctgcgcaagagcgtggagactcgcgactggctcagcactctggagccccggaatgtgcgggccgtcatgaagcgggtggtggaggataccaccgccatcgacgtgcaggtggggctcctgtacgaagagggtgttcgcaaggcccagagcagcgactccagcaagaggactttctccgtgtacagcagctctcggcagcagggccgctacgcccccagctatacccccagtgccccgatggacaccaacctcttgagcaatatccagaagctattctctgaacgtattgatgtgttcagccctgtggagttcaacaaggtgtcggtgctgaccggcatcatcaagatcagcctgaagacgctgctggagtgtgtgcggctgcgcacctttgggcgcttcgggctgcagcaggtgcaagtggactgccactttctgcagctctacctgtggcgttttgtggccgacgaagaactcgtgcacttgctgctggacgaagtggtggcctctgctgccctgcgctgcccagaccctgtgcccatggagcccagtgtggttgangtcatctgcgagcgcggctaggcgcanccgctgccatgcaccggtctgtccctgcaccccatggcacccaggatctgggtctcggtggtccttccccgcaggcaggtgtcaggaccggcctaataaacatgtgtggcctcctcnaaaaaannnnnnnnnnnnnnnnnnnnnnn

SEQ ID NO: 34 - DNA, 851 bp, Homo sapiens
gaggatgcctgcgagcatctggcggagtacttggaagcctattggaaggccacacacccgcccagcagcacgccacccaatccgctgctgaaccgcaccatggctaccgcagccctggctgccagccctgcccctgtctccaacctccagggaccctaccttgcttccggggaccagccactggaacgggccaccggggagcacgccagcatgcacgagtacccaggggagctgggccagcccccaggcctttaccccagcagccacccaccaggccgggcaggcacgctacgggcactgtcccgccaagacacttttgatgccgacacccccggcagccgaaactctgcctacacggagctgggagactcatgtgtggacatggagactgacccctcagaggggccagggcttggagaccctgcagggggcggcacgcccccagcccgacagggatcctgggaggacgaggaagaagactatgaggaagagctgaccgacaaccggaaccggggccggaataaggcccgctactgcgctgagggtgggggtccagttttggggcgcaacaagaatgagctggagggctggggacgaggcgtctacattcgctgagaggcaggggccacacggcgggaggaagggctctgagcccaggggaggggagggagcgaggggctcacacctgacatgtattcgcctccagggggcgctgtctccctcctttcagatgcctttgctcaaagcttggggtttctttggtgttaccatcccagctcccgggaggcccttaagccccagctgtcggtttttacctgcctgttgtggatggatgggggatacccaccttt

SEQ ID NO: 35 - DNA, 994 bp, Homo sapiens
  misc_feature (637)..(637): n is a, c, g, or t
  misc_feature (692)..(692): n is a, c, g, or t
  misc_feature (701)..(701): n is a, c, g, or t
  misc_feature (718)..(718): n is a, c, g, or t
  misc_feature (720)..(720): n is a, c, g, or t
  misc_feature (730)..(730): n is a, c, g, or t
  misc_feature (734)..(734): n is a, c, g, or t
  misc_feature (747)..(748): n is a, c, g, or t
  misc_feature (759)..(759): n is a, c, g, or t
  misc_feature (761)..(761): n is a, c, g, or t
  misc_feature (788)..(788): n is a, c, g, or t
  misc_feature (790)..(790): n is a, c, g, or t
  misc_feature (792)..(792): n is a, c, g, or t
  misc_feature (799)..(799): n is a, c, g, or t
  misc_feature (818)..(818): n is a, c, g, or t
  misc_feature (830)..(831): n is a, c, g, or t
  misc_feature (837)..(837): n is a, c, g, or t
  misc_feature (843)..(843): n is a, c, g, or t
  misc_feature (852)..(852): n is a, c, g, or t
  misc_feature (856)..(856): n is a, c, g, or t
  misc_feature (859)..(859): n is a, c, g, or t
  misc_feature (863)..(863): n is a, c, g, or t
  misc_feature (867)..(867): n is a, c, g, or t
  misc_feature (870)..(870): n is a, c, g, or t
  misc_feature (872)..(872): n is a, c, g, or t
  misc_feature (881)..(881): n is a, c, g, or t
  misc_feature (886)..(886): n is a, c, g, or t
  misc_feature (888)..(888): n is a, c, g, or t
  misc_feature (899)..(899): n is a, c, g, or t
  misc_feature (917)..(917): n is a, c, g, or t
  misc_feature (925)..(925): n is a, c, g, or t
  misc_feature (940)..(940): n is a, c, g, or t
  misc_feature (946)..(946): n is a, c, g, or t
  misc_feature (948)..(949): n is a, c, g, or t
  misc_feature (951)..(951): n is a, c, g, or t
  misc_feature (962)..(962): n is a, c, g, or t
  misc_feature (966)..(966): n is a, c, g, or t
  misc_feature (972)..(972): n is a, c, g, or t
  misc_feature (979)..(980): n is a, c, g, or t
  misc_feature (985)..(985): n is a, c, g, or t
ggtggtcgcgtctcggaaaccggtagcgcttgcagcatggctgaccaactgactgaagagcagattgcagaattcaaagaagctttttcactatttgacaaagatggtgatggaactataacaacaaaggaattgggaactgtaatgagatctcttgggcagaatcccacagaagcagagttacaggacatgattaatgaagtagatgctgatggtaatggcacaattgacttccctgaatttctgacaatgatggcaagaaaaatgaaagacacagacagtgaagaagaaattagagaagcattccgtgtgtttgataaggatggcaatggctatattagtgctgcagaacttcgccatgtgatgacaaaccttggagagaagttaacagatgaagaagttgatgaaatgatcagggaagcagatattgatggtgatggtcaagtaaactatgaagagtttgtacaaatgatgacagcaaagtgaagaccttgtacagaatgtgttaaatttcttgtacaaaattgtttatttgccttttctttgtttgtaacttatctgtaaaaggtttctccctactgtcaaaaaaaatatgcatgtatagtaattaggacttcattcctccatgtttttcttncccttatcttactgtccattgtccctaaaacctttatttttagaaaatttgatcnagtaacatngttgcatgtgccttacncnggatatatcntaanccctttctgcacnntctaaaacttnanatggagtttggtcaaatggagggaacntncnggggttntgccctttttttaaaagtnattttccctttnngaactntccccntgttttttntttnaantggngganttntnacctctgcntgggncnttggaccagtnccaccaaattgttccttnaaagtttnccccttttgccaacncggggntnntntcccggacccnccanccattnttttttnncctgncgggccccg

SEQ ID NO: 36 - DNA, 977 bp, Homo sapiens
  misc_feature (763)..(763): n is a, c, g, or t
  misc_feature (793)..(793): n is a, c, g, or t
  misc_feature (817)..(817): n is a, c, g, or t
  misc_feature (824)..(824): n is a, c, g, or t
  misc_feature (862)..(862): n is a, c, g, or t
  misc_feature (869)..(869): n is a, c, g, or t
  misc_feature (875)..(875): n is a, c, g, or t
  misc_feature (888)..(888): n is a, c, g, or t
  misc_feature (903)..(903): n is a, c, g, or t
  misc_feature (922)..(922): n is a, c, g, or t
  misc_feature (951)..(952): n is a, c, g, or t
  misc_feature (954)..(954): n is a, c, g, or t
  misc_feature (957)..(958): n is a, c, g, or t
  misc_feature (960)..(960): n is a, c, g, or t
  misc_feature (968)..(968): n is a, c, g, or t
  misc_feature (970)..(970): n is a, c, g, or t
  misc_feature (973)..(973): n is a, c, g, or t
  misc_feature (976)..(976): n is a, c, g, or t
ggcctgggtgggggcctgggaaatgtgcttggaggcctgatcagcggggccgggggcggcggcggcggcggcggcggcggcggcggtggtggaggcggcggtggcggtggaacggccatgcgcatcctaggcggagtcatcagcgccatcagcgaggcggctgcgcagtacaacccggagcccccgcccccacgcacacattactccaacattgaggccaacgagagtgaggaggtccggcagttccggagactctttgcccagctggctggagatgacatggaggtcagcgccacagaactcatgaacattctcaataaggttgtgacacgacaccctgatctgaagactgatggttttggcattgacacatgtcgcagcatggtggccgtgatggatagcgacaccacaggcaagctgggctttgaggaattcaagtacttgtggaacaacatcaaaaggtggcaggccatatacaaacagttcgacactgaccgatcagggaccatttgcagtagtgaactcccaggtgcctttgaggcagcagggttccacctgaatgagcatctctataacatgatcatccgacgctactcagatgaaagtgggaacatggattttgacaacttcatcagcagcttggtcaggctggacgccatgttccgtgccttcaaatctcttgacaaagatggcactggacaaatccaggtgaacatccaggagtggctgcagctgactatgtattcctgaactggaaccccanaaccgccccctcaccgccttgctataagantcacctggagcctcggtctctccnagggccnatcctgtctgcagtcacatctttgtggggcctgctganccacaancttttngttctctcaatanttgttaaccaacttntcaaaatccaagggccaantttgccctgcctgaaattccccctggctnnanganncnctaaaaancnttnttnc

SEQ ID NO: 37 - DNA, 1050 bp, Homo sapiens
  misc_feature (809)..(809): n is a, c, g, or t
  misc_feature (826)..(827): n is a, c, g, or t
  misc_feature (829)..(837): n is a, c, g, or t
  misc_feature (839)..(845): n is a, c, g, or t
  misc_feature (863)..(863): n is a, c, g, or t
  misc_feature (865)..(866): n is a, c, g, or t
  misc_feature (887)..(887): n is a, c, g, or t
  misc_feature (900)..(900): n is a, c, g, or t
  misc_feature (917)..(917): n is a, c, g, or t
  misc_feature (942)..(942): n is a, c, g, or t
  misc_feature (952)..(952): n is a, c, g, or t
  misc_feature (966)..(966): n is a, c, g, or t
  misc_feature (979)..(979): n is a, c, g, or t
  misc_feature (986)..(986): n is a, c, g, or t
  misc_feature (994)..(994): n is a, c, g, or t
  misc_feature (997)..(997): n is a, c, g, or t
  misc_feature (1002)..(1002): n is a, c, g, or t
  misc_feature (1007)..(1007): n is a, c, g, or t
  misc_feature (1016)..(1016): n is a, c, g, or t
  misc_feature (1018)..(1018): n is a, c, g, or t
  misc_feature (1020)..(1020): n is a, c, g, or t
  misc_feature (1042)..(1042): n is a, c, g, or t
gggaggaatgaaatgtgtgaagttcttgctctacgtcctcctgctggccttttgcgcctgtgcagtgggactgattgccgtgggtgtcggggcacagcttgtcctgagtcagaccataatccagggggctacccctggctctctgttgccagtggtcatcatcgcagtgggtgtcttcctcttcctggtggcttttgtgggctgctgcggggcctgcaaggagaactattgtcttatgatcacgtttgccatctttctgtctcttatcatgttggtggaggtggccgcagccattgctggctatgtgtttagagataaggtgatgtcagagtttaataacaacttccggcagcagatggagaattacccgaaaaacaaccacactgcttcgatcctggacaggatgcaggcagattttaagtgctgtggggctgctaactacacagattgggagaaaatcccttccatgtcgaagaaccgagtccccgactcctgctgcattaatgttactgtgggctgtgggattaatttcaacgagaaggcgatccataaggagggctgtgtggagaagattgggggctggctgaggaaaaatgtgctggtggtagctgcagcagcccttggaattgcttttgtcgaggttttgggaattgtctttgcctgctgcctcgtgaagagtatcagaagtggctacgaggtgatgtaggggtctggtctcctcagcctcctcatctgggggagtggaatagtatcctccaggtttttcaattaaacggattattttttcagaccgaaaaagatggtctgantttgtcttaaaaaaaannannnnnnnnnannnnnnnggggcggccgccccctananngagtcgaataagcttaattanctgaactgggacncctgttgaaaatccagnaatgaccccaaaactccatctgganttgttcaaanccccggttgccccnggggttttttatngggaaanccaactanctnggcanatttncggaactangnanctaaatggaaaaaaaatcctgnaaaacccc

SEQ ID NO: 38 - DNA, 1003 bp, Homo sapiens
  misc_feature (819)..(819): n is a, c, g, or t
  misc_feature (825)..(825): n is a, c, g, or t
  misc_feature (831)..(831): n is a, c, g, or t
  misc_feature (852)..(852): n is a, c, g, or t
  misc_feature (867)..(868): n is a, c, g, or t
  misc_feature (873)..(873): n is a, c, g, or t
  misc_feature (878)..(878): n is a, c, g, or t
  misc_feature (897)..(897): n is a, c, g, or t
  misc_feature (905)..(906): n is a, c, g, or t
  misc_feature (930)..(931): n is a, c, g, or t
  misc_feature (938)..(938): n is a, c, g, or t
  misc_feature (947)..(947): n is a, c, g, or t
  misc_feature (956)..(956): n is a, c, g, or t
  misc_feature (960)..(961): n is a, c, g, or t
  misc_feature (963)..(963): n is a, c, g, or t
  misc_feature (965)..(965): n is a, c, g, or t
  misc_feature (975)..(975): n is a, c, g, or t
  misc_feature (990)..(990): n is a, c, g, or t
  misc_feature (992)..(992): n is a, c, g, or t
  misc_feature (994)..(994): n is a, c, g, or t
  misc_feature (997)..(997): n is a, c, g, or t
  misc_feature (1001)..(1001): n is a, c, g, or t
ggcaggagctgtcgggaagatcagaagccagtcatggatgaccagcgcgaccttatctccaacaatgagcaactgcccatgctgggccggcgccctggggccccggagagcaagtgcagccgcggagccctgtacacaggcttttccatcctggtgactctgctcctcgctggccaggccaccaccgcctacttcctgtaccagcagcagggccggctggacaaactgacagtcacctcccagaacctgcagctggagaacctgcgcatgaagcttcccaagcctcccaagcctgtgagcaagatgcgcatggccaccccgctgctgatgcaggcgctgcccatgggagccctgccccaggggcccatgcagaatgccaccaagtatggcaacatgacagaggaccatgtgatgcacctgctccagaatgctgaccccctgaaggtgtacccgccactgaaggggagcttcccggagaacctgagacaccttaagaacaccatggagaccatagactggaaggtctttgagagctggatgcaccattggctcctgtttgaaatgagcaggcactccttggagcaaaagcccactgacgctccaccgaaagagtcactggaactggaggacccgtcttctgggctgggtgtgaccaagcaggatctgggcccagtccccatgtgagagcagcagaggcggtcttcaacatcctgccagccccacacagctacagctttcttgctcccttcagcccccagcccctcccccatctcccaccctgtgcctcatcccatgaaaccctggtgcctggctctttcntcaccnttgganaaaaaaaccaagtcggaacancaaataacaatgcannaaggncctgntgcccaatctccatttgtnaaaggggnntgaggtcccagaagtggccaaaanntaaaaanatcccgttncttaaaatnaaannancntccaaaaaanggttccaaaaactangntnttngaanaa

SEQ ID NO: 39 - DNA, 993 bp, Homo sapiens
  misc_feature (761)..(761): n is a, c, g, or t
  misc_feature (778)..(778): n is a, c, g, or t
  misc_feature (803)..(803): n is a, c, g, or t
  misc_feature (810)..(810): n is a, c, g, or t
  misc_feature (822)..(823): n is a, c, g, or t
  misc_feature (826)..(826): n is a, c, g, or t
  misc_feature (830)..(830): n is a, c, g, or t
  misc_feature (843)..(843): n is a, c, g, or t
  misc_feature (845)..(845): n is a, c, g, or t
  misc_feature (859)..(859): n is a, c, g, or t
  misc_feature (867)..(867): n is a, c, g, or t
  misc_feature (886)..(886): n is a, c, g, or t
  misc_feature (891)..(891): n is a, c, g, or t
  misc_feature (900)..(900): n is a, c, g, or t
  misc_feature (912)..(912): n is a, c, g, or t
  misc_feature (927)..(927): n is a, c, g, or t
  misc_feature (930)..(930): n is a, c, g, or t
  misc_feature (940)..(940): n is a, c, g, or t
  misc_feature (944)..(944): n is a, c, g, or t
  misc_feature (956)..(956): n is a, c, g, or t
  misc_feature (961)..(961): n is a, c, g, or t
  misc_feature (964)..(966): n is a, c, g, or t
  misc_feature (971)..(972): n is a, c, g, or t
  misc_feature (977)..(977): n is a, c, g, or t
  misc_feature (982)..(982): n is a, c, g, or t
  misc_feature (990)..(990): n is a, c, g, or t
  misc_feature (992)..(993): n is a, c, g, or t
gggtcggaaaaaagggagaagaaaccggcaccctctctgagaggcaacagaagcagcaattgtttcagcgaaaaaagcagcaagggagggagtgaaggaaaaaagcaaaaaagggggcgacacgcaagtgcctgtaggggtgaaaggagcagggaccggcgatctagggggggatcagctacaaaagaaactgtcactgggagcggtgcggccaaggaggaagcagtgctgccaggctctgctccagggcacagctggctggcggctgccctgtccgcagcaaaggggcacaggccggggaccgcgagaggtggcaaagtggcaccgggcgccgaggctgctgagcgctcgccgagacggcgaccggactggctgccccggaactgcggcgactctccctactcagaacttggcctacgtttcccaggactctccccatctccagaggcccccacaaaaccgggaaaggaaggaaaggacagcggcggcagcagctcaatgagtgcctacagcagaaagcctgaacgagctcggtcgtaggcgggaagttcccgggggggctgcccagtgcagccgcaatgctgccgcgagctgccccagcagtccgggctccgtagacgctttccgcatcactctccttcctcgggctgccgggagtcccgggacctggcggggccggcatgacgggcttctcgggggcccgccgcacgcccggcagcctccggagacgcgcgccgagcccggctcccacggcctctgangctcggcgggggctgcngctgcctggcgggcgggctccgganctttctngagcggcattannccncggnttggccccggacncnaccaaaggctcttntggaaaancccaaaacactgggcatcnttacnacctgtaanttgaggccaccnaattgctactcccgntcnccttttggcnattntttttttaaccntccgnaannnttcannatccnacccnccgggggntnn

SEQ ID NO: 40 - DNA, 999 bp, Homo sapiens
  misc_feature (595)..(595): n is a, c, g, or t
  misc_feature (626)..(626): n is a, c, g, or t
  misc_feature (652)..(652): n is a, c, g, or t
  misc_feature (711)..(711): n is a, c, g, or t
  misc_feature (743)..(743): n is a, c, g, or t
  misc_feature (747)..(747): n is a, c, g, or t
  misc_feature (764)..(764): n is a, c, g, or t
  misc_feature (767)..(767): n is a, c, g, or t
  misc_feature (774)..(774): n is a, c, g, or t
  misc_feature (786)..(786): n is a, c, g, or t
  misc_feature (788)..(788): n is a, c, g, or t
  misc_feature (795)..(795): n is a, c, g, or t
  misc_feature (797)..(797): n is a, c, g, or t
  misc_feature (808)..(808): n is a, c, g, or t
  misc_feature (834)..(834): n is a, c, g, or t
  misc_feature (837)..(837): n is a, c, g, or t
  misc_feature (842)..(842): n is a, c, g, or t
  misc_feature (844)..(844): n is a, c, g, or t
  misc_feature (863)..(865): n is a, c, g, or t
  misc_feature (882)..(882): n is a, c, g, or t
  misc_feature (887)..(887): n is a, c, g, or t
  misc_feature (891)..(891): n is a, c, g, or t
  misc_feature (899)..(899): n is a, c, g, or t
  misc_feature (903)..(904): n is a, c, g, or t
  misc_feature (931)..(932): n is a, c, g, or t
  misc_feature (939)..(940): n is a, c, g, or t
  misc_feature (943)..(943): n is a, c, g, or t
  misc_feature (979)..(979): n is a, c, g, or t
  misc_feature (981)..(982): n is a, c, g, or t
  misc_feature (990)..(993): n is a, c, g, or t
  misc_feature (996)..(996): n is a, c, g, or t
ggcaccgcgtctccagcgatcccggatccactgcgctgccaggggcctgggggtgggtctcttgctgtctctgcgacgacatccttacgtttcggcactctaatgctgggtttgtgcgtgtgtgtctgcttagcggtctagcgggctgttaggctccctcgcccccagctccttggctcgctcagctcctccaccgcagcccagcagtgagacgcgcgcgcagccagctccccacgagatggaacagaccgaagtgctgaagccacggaccctggctgatctgatccgcatcctgcaccagctctttgccggcgatgaggtcaatgtagaggaggtgcaggccatcatggaagcctacgagagcgaccccaccgagtgggcaatgtacgccaagttcgaccagtacaggtatacccgaaatcttgtggatcaaggaaatggaaaatttaatctgatgattctctgttggggtgaaggacatggcagcagtattcatgatcataccaactcccactgctttctgaagatgctacagggaaatctaaaggagacattatttgcctggcctgacaaaaaatccaatgagatggtcaanaagtctgaaaaagtcttgagggaaaaaccantgtgcctacatcaatgattccattgncttacatcgagtaaagaacattcagccatacggaaacctgctgtgagcctttcacttgntacagttccaccttttgatacatgccatgccntttnaatcaaggaacaggaanatnaaaaacnaagtcccaaagnanattccanantaaatttggantcaaaaactccaaatggcaacttccnggnctcgntngaaaacaaactaaggggcnnncaaacccttctgaaggntttantttnaaggttcncctnnaagtttgcccttggaaacaaaaaagcnnacctacnncgngctaatcccagaaaaaatactttaaaataacccaantnnttaaaatnnnnttnaag

SEQ ID NO: 41 - DNA, 873 bp, Homo sapiens
ggcctgataaccatgctggctgccacagtcctgaccctggccctgctgggcaatgcccatgcctgctccaaaggcacctcgcacgaggcaggcatcgtgtgccgcatcaccaagcctgccctcctggtgttgaaccacgagactgccaaggtgatccagaccgccttccagcgagccagctacccagatatcacgggcgagaaggccatgatgctccttggccaagtcaagtatgggttgcacaacatccagatcagccacttgtccatcgccagcagccaggtggagctggtggaagccaagtccattgatgtctccattcagaacgtgtctgtggtcttcaaggggaccctgaagtatggctacaccactgcctggtggctgggtattgatcagtccattgacttcgagatcgactctgccattgacctccagatcaacacacagctgacctgtgactctggtagagtgcggaccgatgcccctgactgctacctgtctttccataagctgctcctgcatctccaaggggagcgagagcctgggtggatcaagcagctgttcacaaatttcatctccttcaccctgaagctggtcctgaagggacagatctgcaaagagatcaacgtcatctctaacatcatggccgattttgtccagacaagggctgccagcatcctttcagatggagacattggggtggacatttccctgacaggtgatcccgtcatcacagcctcctacctgggagtcccatcacaaggcagtgctggagacctggggcttcaacaccaaccaggaaatcttccaagaggttgtcggcggcttccccagccaggcccaagtcaccgtccactgcctcaagatgcccaa

SEQ ID NO: 42 - DNA, 1040 bp, Homo sapiens
  misc_feature (823)..(823): n is a, c, g, or t
  misc_feature (837)..(837): n is a, c, g, or t
  misc_feature (854)..(854): n is a, c, g, or t
  misc_feature (858)..(858): n is a, c, g, or t
  misc_feature (878)..(878): n is a, c, g, or t
  misc_feature (888)..(888): n is a, c, g, or t
  misc_feature (893)..(893): n is a, c, g, or t
  misc_feature (903)..(903): n is a, c, g, or t
  misc_feature (909)..(909): n is a, c, g, or t
  misc_feature (936)..(936): n is a, c, g, or t
  misc_feature (940)..(940): n is a, c, g, or t
  misc_feature (943)..(943): n is a, c, g, or t
  misc_feature (948)..(948): n is a, c, g, or t
  misc_feature (960)..(960): n is a, c, g, or t
  misc_feature (967)..(967): n is a, c, g, or t
  misc_feature (970)..(970): n is a, c, g, or t
  misc_feature (985)..(985): n is a, c, g, or t
  misc_feature (995)..(995): n is a, c, g, or t
  misc_feature (1014)..(1016): n is a, c, g, or t
  misc_feature (1019)..(1019): n is a, c, g, or t
  misc_feature (1021)..(1026): n is a, c, g, or t
  misc_feature (1030)..(1033): n is a, c, g, or t
  misc_feature (1035)..(1039): n is a, c, g, or t
gccggcagcggctgcagcgctctcgtcttctgcggctctcggtgccctctccttttcgtttccggaaacatggcctccggtgtggctgtctctgatggtgtcatcaaggtgttcaacgacatgaaggtgcgtaagtcttcaacgccagaggaggtgaagaagcgcaagaaggcggtgctcttctgcctgagtgaggacaagaagaacatcatcctggaggagggcaaggagatcctggtgggcgatgtgggccagactgtcgacgatccctacgccacctttgtcaagatgctgccagataaggactgccgctatgccctctatgatgcaacctatgagaccaaggagagcaagaaggaggatctggtgtttatcttctgggcccccgagtctgcgccccttaagagcaaaatgatttatgccagctccaaggacgccatcaagaagaagctgacagggatcaagcatgaattgcaagcaaactgctacgaggaggtcaaggaccgctgcaccctggcagagaagctggggggcagtgccgtcatctccctggagggcaagcctttgtgagccccttctggccccctgcctggagcatctggcagccccacacctgcccttgggggttgcaggctgcccccttcctgccagaccggaggggctggggggatcccagcagggggagggcaatcccttcaccccagttgccaaacagaccccccaccccctggattttccttctccctccatccccttgacggttctggccttcccaaaactgcttttgatcttttgattcctcttgggcttaaagcaaaccaanttcccccccagggnaccccagttgtgggggnagcntgtatttttttttaaaaaanatcccccatnccccncctgggtccncccccnttcccatgctggccaaatttctaaccncaanaangaacnctgggccttggnctggttnaanttccgggaaaaaaanggaaattttntggaaatgaaaaaaaaaannnaanannnnnnaaannnnannnnna

SEQ ID NO: 43 - DNA, 1033 bp, Homo sapiens
  misc_feature (815)..(815): n is a, c, g, or t
  misc_feature (827)..(827): n is a, c, g, or t
  misc_feature (848)..(848): n is a, c, g, or t
  misc_feature (864)..(864): n is a, c, g, or t
  misc_feature (869)..(869): n is a, c, g, or t
  misc_feature (880)..(880): n is a, c, g, or t
  misc_feature (889)..(889): n is a, c, g, or t
  misc_feature (891)..(891): n is a, c, g, or t
  misc_feature (930)..(930): n is a, c, g, or t
  misc_feature (933)..(933): n is a, c, g, or t
  misc_feature (939)..(939): n is a, c, g, or t
  misc_feature (952)..(952): n is a, c, g, or t
  misc_feature (956)..(956): n is a, c, g, or t
  misc_feature (959)..(959): n is a, c, g, or t
  misc_feature (969)..(969): n is a, c, g, or t
  misc_feature (980)..(982): n is a, c, g, or t
  misc_feature (986)..(986): n is a, c, g, or t
  misc_feature (991)..(992): n is a, c, g, or t
  misc_feature (997)..(997): n is a, c, g, or t
  misc_feature (1004)..(1004): n is a, c, g, or t
  misc_feature (1014)..(1014): n is a, c, g, or t
  misc_feature (1022)..(1023): n is a, c, g, or t
  misc_feature (1025)..(1025): n is a, c, g, or t
  misc_feature (1030)..(1030): n is a, c, g, or t
  misc_feature (1033)..(1033): n is a, c, g, or t
ggagagaagggcctgagtgcagagccagggtggcaggcaaagagagaagaggaggaggaggaggaggaggaggctgaggctggagaggaggctgtccccgaggaagaaggccccactgtagtgctgaacccccacccgagccttggctacaaggagatccggaaaggcgagagtcggtcggaggctctggctgtggatggagctgggaagcctggggctgaggaggctcaggaccccgaagggaagggagaacaggagcactcccagcagaaagaggaggaggaggagatggcagtggtcccgcaaggcctcttccggggtgggaagagcggagagctggagcaggaggaggagcggctctccaaggagtgggaggactccaaacgctggagcaagatggaccagctggccaaggagctgacggctgagaagcggctggaggggcaggaggaggaggaggacaaccgggacagttccatgaagctctccttccgggcccgggcctacggcttcaggggccctgggccgcagctgcgacgaggctggaggccatcctcccgggaggacagccttgaggcgggcctgcccctccaggtccgaggctaccccgaggagaagaaagaggaggagggcagcgcaaaccgcagaccagaggaccaggagctggagagcctgtcggccattgaggcagagctggagaaagtggcccaccagctgcaggcactacggcggggctgaaacaccggctggcagggctggccccagggcaccctgtggccctggctctgctgtcccctttggcaggtcctggccanatggcccggacnctgcttccggtagggaggcancctccagcttgcccancccangccacctatcnccccctacncnccttgtctcctactcctgactcctacctgccctggaaantcntttgcngggcaccccccantttnaantttgacaatncttttctgaannnggcnctttnnaaaantttcctnccccctctanccctgggnnantgcantan

SEQ ID NO: 44 - DNA, 1020 bp, Homo sapiens
  misc_feature (393)..(393): n is a, c, g, or t
  misc_feature (695)..(695): n is a, c, g, or t
  misc_feature (726)..(726): n is a, c, g, or t
  misc_feature (797)..(798): n is a, c, g, or t
  misc_feature (843)..(843): n is a, c, g, or t
  misc_feature (847)..(847): n is a, c, g, or t
  misc_feature (865)..(865): n is a, c, g, or t
  misc_feature (886)..(886): n is a, c, g, or t
  misc_feature (897)..(897): n is a, c, g, or t
  misc_feature (909)..(909): n is a, c, g, or t
  misc_feature (924)..(925): n is a, c, g, or t
  misc_feature (932)..(932): n is a, c, g, or t
  misc_feature (936)..(936): n is a, c, g, or t
  misc_feature (940)..(940): n is a, c, g, or t
  misc_feature (944)..(945): n is a, c, g, or t
  misc_feature (966)..(966): n is a, c, g, or t
  misc_feature (980)..(980): n is a, c, g, or t
  misc_feature (995)..(997): n is a, c, g, or t
  misc_feature (1016)..(1017): n is a, c, g, or t
gagcgcagcctggcctggggcccggtcgagcccgcgccatggcggccgaggcgacagctgtggccggaagcggggctgttggcggctgcctggccaaagacggcttgcagcagtctaagtgcccggacactaccccaaaacggcggcgcgcctcgtcgctgtcgcgtgacgccgagcgccgagcctaccaatggtgccgggagtacttgggcggggcctggcgccgagtgcagcccgaggagctgagggtttaccccgtgagcggaggcctcagcaacctgctcttccgctgctcgctcccggaccacctgcccagcgttggcgaggagccccgggaggtgcttctgcggctgtacggagccatcttgcagggcgtggactccctggtgctanaaagcgtgatgttcgccatacttgcggagcggtcgctggggccccagctgtacggagtcttcccagagggccggctggaacagtacatcccaagtcggccattgaaaactcaagagcttcgagagccagtgttgtcagcagccattgccacgaagatggcgcaatttcatggcatggagatgcctttcaccaaggagccccactggctgtttgggaccatggagcggtacctaaaacagatccaggacctgcccccaactggcctccctgagatgaacctgctggagatgtacagcctgaangatgagatgggcaacctcaggaagttactanagtctaccccatcgccagtcgtcttctgccacaatgacatccaggaaaggaacatcttgctgctctcaaanncagaaaatgctgacagcctcatgctggtggacttcgagtacacanttanaactataggggctttganattgggaaccatttttgtgantgggttttatnattatactcacnaagaaatggcttttnnaaaaaanaagnccanaaannaccccactcaaaaaaaaacanttgcattttattcnccataaccggcaaannnaaaaaaaggtgaaaacccnnccc

SEQ ID NO: 45 - DNA, 1104 bp, Homo sapiens
  misc_feature (789)..(789): n is a, c, g, or t
  misc_feature (831)..(831): n is a, c, g, or t
  misc_feature (843)..(843): n is a, c, g, or t
  misc_feature (904)..(904): n is a, c, g, or t
  misc_feature (913)..(913): n is a, c, g, or t
  misc_feature (931)..(931): n is a, c, g, or t
  misc_feature (938)..(938): n is a, c, g, or t
  misc_feature (991)..(992): n is a, c, g, or t
  misc_feature (1001)..(1001): n is a, c, g, or t
  misc_feature (1012)..(1014): n is a, c, g, or t
  misc_feature (1020)..(1021): n is a, c, g, or t
  misc_feature (1027)..(1027): n is a, c, g, or t
  misc_feature (1029)..(1029): n is a, c, g, or t
  misc_feature (1034)..(1034): n is a, c, g, or t
  misc_feature (1036)..(1036): n is a, c, g, or t
  misc_feature (1047)..(1047): n is a, c, g, or t
  misc_feature (1049)..(1049): n is a, c, g, or t
  misc_feature (1054)..(1054): n is a, c, g, or t
  misc_feature (1061)..(1061): n is a, c, g, or t
  misc_feature (1070)..(1070): n is a, c, g, or t
  misc_feature (1079)..(1079): n is a, c, g, or t
  misc_feature (1083)..(1083): n is a, c, g, or t
  misc_feature (1088)..(1089): n is a, c, g, or t
  misc_feature (1091)..(1091): n is a, c, g, or t
  misc_feature (1093)..(1094): n is a, c, g, or t
gcgctccgggagctgccgacggacggagcgcccccgcccccgcccggccgcccgcccgccgccgccatgcccttctccaacagccacaacgcactgaagctgcgcttcccggccgaggacgagttccccgacctgagcgcccacaacaatcacatggccaaggtgctgacccccgagctgtacgcggagctgcgcgccaagagcacgccgagcggcttcacgctggacgacgtcatccagacaggcgtggacaacccgggccacccgtacatcatgaccgtgggctgcgtggcgggcgacgaggagtcctacgaagtgttcaaggatctcttcgaccccatcatcgaggaccggcacggcggctacaagcccagcgatgagcacaagaccgacctcaaccccgacaacctgcagggcggcgacgacctggaccccaactacgtgctgagctcgcgggtgcgcacgggccgcagcatccgtggcttctgcctccccccgcactgcagccgcggggagcgccgagccatcgagaagctcgcggtggaagccctgtccagcctggacggcgacctggcgggccgatactacgcgctcaagagcatgacggaggcggagcagcagcagctcatcgacgaccacttcctcttcgacaagcccgtgtcgcccctgctgctggcctcgggcatggcccgcgactggcccgacgcccgcggtatctggcacaatgacaataagaccttcctggtgtgggtcaacgaggaggaccacctgcgggtcatctccatgcanaaggggggcaacatgaaggaggtgttcacccgcttctgcacnggcctcacccanattgaaaactctcttcagtctaaggactatgagttcatgtggaaaccctcacctgggctanatcctcacntgcccatccaacctgggnaccgggntgcgggcaggtgtgcatatcagctgcccaacttggggcaaacatgaaaatttnncggaagtgnttaagcgggtnnnaatttnnaaaacnanggcanangggggggtggnanccggnttggggnggggggggntttttaaantttncaaanntnanncctgggtttt

SEQ ID NO: 46 - DNA, 1012 bp, Homo sapiens
  misc_feature (764)..(764): n is a, c, g, or t
  misc_feature (780)..(780): n is a, c, g, or t
  misc_feature (800)..(800): n is a, c, g, or t
  misc_feature (823)..(823): n is a, c, g, or t
  misc_feature (845)..(845): n is a, c, g, or t
  misc_feature (852)..(852): n is a, c, g, or t
  misc_feature (875)..(875): n is a, c, g, or t
  misc_feature (877)..(877): n is a, c, g, or t
  misc_feature (894)..(894): n is a, c, g, or t
  misc_feature (911)..(911): n is a, c, g, or t
  misc_feature (913)..(914): n is a, c, g, or t
  misc_feature (940)..(940): n is a, c, g, or t
  misc_feature (950)..(951): n is a, c, g, or t
  misc_feature (955)..(955): n is a, c, g, or t
  misc_feature (970)..(971): n is a, c, g, or t
  misc_feature (973)..(973): n is a, c, g, or t
  misc_feature (977)..(977): n is a, c, g, or t
  misc_feature (980)..(980): n is a, c, g, or t
  misc_feature (983)..(984): n is a, c, g, or t
  misc_feature (987)..(989): n is a, c, g, or t
  misc_feature (1006)..(1007): n is a, c, g, or t
  misc_feature (1010)..(1010): n is a, c, g, or t
ggggtcgttgtggtgcgctgtcttcccgcttgcgtcagggacctgcccgactcagtggccgccatggcatcagatgaaggcaaactttttgttggagggctgagttttgacaccaatgagcagtcgctggagcaggtcttctcaaagtacggacagatctctgaagtggtggttgtgaaagacagggagacccagagatctcggggatttgggtttgtcacctttgagaacattgacgacgctaaggatgccatgatggccatgaatgggaagtctgtagatggacggcagatccgagtagaccaggcaggcaagtcgtcagacaaccgatcccgtgggtaccgtggtggctctgccgggggccggggcttcttccgtgggggccgaggacggggccgtgggttctctagaggaggaggggaccgaggctatggggggaaccggttcgagtccaggagtgggggctacggaggctccagagactactatagcagccggagtcagagtggtggctacagtgaccggagctcgggcgggtcctacagagacagttacgacagttacgctacacacaacgagtaaaaacccttcctgctcaagatcgtccttccaatggctgtgtgtttaaagattgtgggagcttcgctgaacgttaatgtgtagtaaatgcacctccttgtattcccactttcgtagtcatttcggttctgatcttgtcaaacccagcctgaccgcttctgacgccgggatggcctcgttactanacttttctttttaagnaagtgctgtttttttttganggttttcaaaacattttgaaaancatttacttttttgaccacganccatganttttcaaaaaatcggggggttgngngggtttttggtttttgntttaatttttggttgcntnncctttttttttttaaggggggttggnccccatgaanngggngcccccctcccttcnntnaaantcnaanngannnggaatccccctcttttnncgnaa

SEQ ID NO: 47 - DNA, 1187 bp, Homo sapiens
  misc_feature (746)..(746): n is a, c, g, or t
  misc_feature (752)..(752): n is a, c, g, or t
  misc_feature (841)..(841): n is a, c, g, or t
  misc_feature (844)..(844): n is a, c, g, or t
  misc_feature (864)..(864): n is a, c, g, or t
  misc_feature (933)..(933): n is a, c, g, or t
  misc_feature (935)..(935): n is a, c, g, or t
  misc_feature (938)..(938): n is a, c, g, or t
  misc_feature (945)..(945): n is a, c, g, or t
  misc_feature (952)..(952): n is a, c, g, or t
  misc_feature (959)..(959): n is a, c, g, or t
  misc_feature (973)..(973): n is a, c, g, or t
  misc_feature (985)..(985): n is a, c, g, or t
  misc_feature (998)..(998): n is a, c, g, or t
  misc_feature (1003)..(1003): n is a, c, g, or t
  misc_feature (1014)..(1014): n is a, c, g, or t
  misc_feature (1017)..(1017): n is a, c, g, or t
  misc_feature (1029)..(1029): n is a, c, g, or t
  misc_feature (1032)..(1032): n is a, c, g, or t
  misc_feature (1043)..(1043): n is a, c, g, or t
  misc_feature (1057)..(1057): n is a, c, g, or t
  misc_feature (1062)..(1062): n is a, c, g, or t
  misc_feature (1064)..(1064): n is a, c, g, or t
  misc_feature (1070)..(1070): n is a, c, g, or t
  misc_feature (1096)..(1096): n is a, c, g, or t
  misc_feature (1102)..(1102): n is a, c, g, or t
  misc_feature (1107)..(1107): n is a, c, g, or t
  misc_feature (1119)..(1119): n is a, c, g, or t
  misc_feature (1121)..(1121): n is a, c, g, or t
  misc_feature (1129)..(1129): n is a, c, g, or t
  misc_feature (1133)..(1133): n is a, c, g, or t
  misc_feature (1135)..(1135): n is a, c, g, or t
  misc_feature (1139)..(1139): n is a, c, g, or t
  misc_feature (1142)..(1142): n is a, c, g, or t
  misc_feature (1145)..(1145): n is a, c, g, or t
  misc_feature (1149)..(1150): n is a, c, g, or t
  misc_feature (1152)..(1152): n is a, c, g, or t
  misc_feature (1174)..(1174): n is a, c, g, or t
  misc_feature (1180)..(1181): n is a, c, g, or t
gcccacgcgtccgcccacgcgtccgggcagcaggtgcgcagccccgtcaccaacattgctcgcaccagcttcttccacgttaagcggtccaacatttggctggcagcagtcaccaagcagaatgtcaacgctgccatggtcttcgaattcctctataagatgtgtgacgtgatggctgcctactttggcaagatcagcgaggaaaacatcaagaacaattttgtgctcatatatgagctgctggatgagattctagactttggctacccacagaattccgagacaggcgcgctgaaaaccttcatcacgcagcagggcatcaagagtcagcatcagacaaaagaagagcagtcacagatcaccagccaggtaactgggcagattggctggcggcgagagggtatcaagtatcgtcggaatgagctcttcctggatgtgctggagagtgtgaacctgctcatgtccccacaagggcaggtgctgagtgcccatgtgtcgggccgggtggtgatgaagagctacctgagtggcatgcctgaatgcaagtttgggatgaatgacaagattgttattgaaaagcagggcaaaggcacagctgatgaaacaagcaagagcgggaagcaatcaattgccattgatgactgcaccttccaccagtgtgtgcgactcagcaagtttgactctgaacgcagcatcagctttatcccgccagatggagagtttgagcttatgaggtatcgcacaanccaagnacatcatccttcccttccgggtgatcccgctagtgcgagaagtgggacgcaccaaactggaggtcaaggtggtcatcaagtcaactttnaancctcactgctggctcaaaanatcgaggtgagaatcccaacccccctgaacacaagcggggtgcaggtgatttgcatgaaggggaaggcnantanaaggccnccaaaangccatcntggggaaaatcaanccatggcaggcntgaaggaatcccnaatcnccccaaaaatnganctttggcctacnacnaaaaaaaaaangggccccacccccntttcntnaaattngagggcctttccggccccttggcccnaggggncctcnttgaaggttttnanccaaactnaatnanccgnccnggngttnncnaaaggggggcccaattggcccngggggnnttaaaa

SEQ ID NO: 48 - DNA, 953 bp, Homo sapiens
  misc_feature (748)..(748): n is a, c, g, or t
  misc_feature (796)..(796): n is a, c, g, or t
  misc_feature (816)..(816): n is a, c, g, or t
  misc_feature (837)..(837): n is a, c, g, or t
  misc_feature (840)..(840): n is a, c, g, or t
  misc_feature (845)..(846): n is a, c, g, or t
  misc_feature (848)..(848): n is a, c, g, or t
  misc_feature (852)..(852): n is a, c, g, or t
  misc_feature (861)..(861): n is a, c, g, or t
  misc_feature (871)..(872): n is a, c, g, or t
  misc_feature (881)..(882): n is a, c, g, or t
  misc_feature (892)..(892): n is a, c, g, or t
  misc_feature (897)..(897): n is a, c, g, or t
  misc_feature (901)..(901): n is a, c, g, or t
  misc_feature (921)..(921): n is a, c, g, or t
  misc_feature (937)..(937): n is a, c, g, or t
  misc_feature (940)..(940): n is a, c, g, or t
  misc_feature (942)..(942): n is a, c, g, or t
  misc_feature (944)..(944): n is a, c, g, or t
  misc_feature (950)..(950): n is a, c, g, or t
ggtgggacgcgccgagccggaggctgcaggatgatgcggttcatgctattattcagccggcagggaaaactgcggctgcaaaaatggtacctggccacttcggacaaggaacggaagaagatggtgcgcgagctcatgcaggttgtcctggctcgaaagcccaagatgtgcagcttcctggagtggagggacctcaaagttgtctataagagatatgccagcctctacttctgctgcgccatcgagggccaagacaatgagctcatcacactggagctgatccaccgatacgtggagctcttagacaaatactttggcagtgtgtgcgagctggacatcatcttcaactttgagaaggcctacttcatcctggatgagtttttgatggggggggatgtccaggacacctccaagaagagtgtgctgaaagccatcgagcaggctgacctactgcaagaggaggatgagtcgccacggagtgtgctggaggagatgggtttggcatagcccctgctgggccggggtgtggcgatggggtcctggcagcgtggcgggaacggctgcttctcctctgcccagggccctgttcttggtgggactcggctgcccctcctctgctgcctcacctttcggagtgagctgtgggctcaggcccttcaaacattccctccctccaccccctacctccactttccccttttcccactgaaggtttttagaagctaggaggcaggaaaatgtgacccanatggggggtgctatttggcttttattccctgcctttgcagaactgaangtcacctcaaatgttccttnccctccctattaactgtaaanatntaaanntntccnaggttaaanggaaaaaggnntttcagggnncttccttgtncctcntctntcccaaaacctaacttccancctcaaccctcccccntancnanccaggnaac

SEQ ID NO: 49 - DNA, 1162 bp, Homo sapiens
  misc_feature (769)..(769): n is a, c, g, or t
  misc_feature (803)..(803): n is a, c, g, or t
  misc_feature (810)..(810): n is a, c, g, or t
  misc_feature (812)..(812): n is a, c, g, or t
  misc_feature (852)..(852): n is a, c, g, or t
  misc_feature (856)..(856): n is a, c, g, or t
  misc_feature (883)..(883): n is a, c, g, or t
  misc_feature (887)..(887): n is a, c, g, or t
  misc_feature (897)..(897): n is a, c, g, or t
  misc_feature (908)..(908): n is a, c, g, or t
  misc_feature (912)..(912): n is a, c, g, or t
  misc_feature (916)..(916): n is a, c, g, or t
  misc_feature (926)..(926): n is a, c, g, or t
  misc_feature (941)..(941): n is a, c, g, or t
  misc_feature (949)..(949): n is a, c, g, or t
  misc_feature (952)..(953): n is a, c, g, or t
  misc_feature (956)..(956): n is a, c, g, or t
  misc_feature (977)..(977): n is a, c, g, or t
  misc_feature (981)..(981): n is a, c, g, or t
  misc_feature (984)..(984): n is a, c, g, or t
  misc_feature (990)..(990): n is a, c, g, or t
  misc_feature (992)..(992): n is a, c, g, or t
  misc_feature (1003)..(1003): n is a, c, g, or t
  misc_feature (1007)..(1007): n is a, c, g, or t
  misc_feature (1009)..(1009): n is a, c, g, or t
  misc_feature (1011)..(1011): n is a, c, g, or t
  misc_feature (1033)..(1033): n is a, c, g, or t
  misc_feature (1037)..(1037): n is a, c, g, or t
  misc_feature (1058)..(1058): n is a, c, g, or t
  misc_feature (1063)..(1063): n is a, c, g, or t
  misc_feature (1069)..(1069): n is a, c, g, or t
  misc_feature (1104)..(1104): n is a, c, g, or t
  misc_feature (1106)..(1106): n is a, c, g, or t
  misc_feature (1111)..(1111): n is a, c, g, or t
  misc_feature (1116)..(1116): n is a, c, g, or t
  misc_feature (1123)..(1123): n is a, c, g, or t
  misc_feature (1125)..(1125): n is a, c, g, or t
  misc_feature (1127)..(1127): n is a, c, g, or t
  misc_feature (1135)..(1135): n is a, c, g, or t
  misc_feature (1151)..(1151): n is a, c, g, or t
  misc_feature (1153)..(1153): n is a, c, g, or t
  misc_feature (1155)..(1156): n is a, c, g, or t
  misc_feature (1162)..(1162): n is a, c, g, or t
gcgcagagccgcgtcgccaagccgcatcagcgcgagaagatcctaaatgagattgagctgcaccgagacctgcagcaccgccacatcgtgcgtttttcgcaccactttgaggacgctgacaacatctacattttcttggagctctgcagccgaaagtccctggcccacatctggaaggcccggcacaccctgttggagccagaagtgcgctactacctgcggcagatcctttctggcctcaagtacttgcaccagcgcggcatcttgcaccgggacctcaagttgggaaattttttcatcactgagaacatggaactgaaggtgggggattttgggctggcagcccggttggagcctccggagcagaggaagaagaccatctgtggcacccccaactatgtggctccagaagtgctgctgagacagggccacggccctgaggcggatgtatggtcactgggctgtgtcatgtacacgctgctctgcgggagccctccctttgagacggctgacctgaaggagacgtaccgctgcatcaagcaggttcactacacgctgcctgccagcctctcactgcctgcccggcagctcctggccgccatccttcgggcctcaccccgagaccgcccctctattgaccagatcctgcgccatgacttctttaccaagggctacacccccgatcgactccctatcagcagctgcgtgacagtcccagacctgacaccccccaacccagctaggagtctgtttgccaaagttaccaaanccctctttggcagaaagaagaaaattaagaatcntgcccangnaaaggatgaagtctccggttttggtgagcggcctcatgcnccanatccgtttggccatcaggatgccaggnccanaaggctccancaacttttggnccancccntgtcagcctngttaaaaaaacaccntgaaaaanagnntcncccccgtgggaaactggcaancaanggnaaatgnantttaaaaaagntttnantntggccccaaaaaatggaatccncccntttgtgtctcgaaaaattttnaaacncttttncccccacggaaaaaaaacccggccccctgggccancnaaaanccttnggggggntnanaaaggggnttaaaacccaaaaaantncnntttggn

SEQ ID NO: 50 - DNA, 817 bp, Homo sapiens
  misc_feature (621)..(621): n is a, c, g, or t
  misc_feature (639)..(639): n is a, c, g, or t
  misc_feature (656)..(656): n is a, c, g, or t
  misc_feature (779)..(779): n is a, c, g, or t
  misc_feature (795)..(817): n is a, c, g, or t
ggggcggtcgcggcgggcagtggcggcagaatgttggctaccagggtatttagcctagttggcaagcgagcaatttccacctctgtgtgtgtacgagctcatgtagagacggggtttcaccatattagccaggatggtctcgatctcctgacctcgtgatccgcctgcctgggcctcccaaagtgctgggattacaggtgtgagccaccgcgcccagccctgcagaaagtgttgtgaagagcgaagacttttcgctcccagcttatatggatcggcgtgaccaccccttgccggaggtggcccatgtcaagcacctgtctgccagccagaaggcactgaaggagaaggagaaggcctcctggagcagcctctccatggatgagaaagtcgagttgtatcgcattaagttcaaggagagctttgctgagatgaacaggggctcgaacgagtggaagacggttgtgggcggtgccatgttcttcatcggtttcaccgcgctcgttatcatgtggcagaagcactatgtgtacggccccctcccgcaaagctttgacaaagagtgggtggccaagcagaccaagaggatgctggacatgaaggtgaaccccatccagggcttancctccaagtgggactacnaaaagaacgagtggaanaagtgagagatgctggcctgcgcctgcacctgcgcctggctctgtcaccgccatgcaactccatgcctatttactggaaacctgttatgccaaacagttgtaccactgctaataaatgaccantttacctgaaaaaaannnnnnnnnnnnnnnnnnnnnnn

SEQ ID NO: 51 - DNA, 1190 bp, Homo sapiens
  misc_feature (675)..(675): n is a, c, g, or t
  misc_feature (724)..(724): n is a, c, g, or t
  misc_feature (821)..(821): n is a, c, g, or t
  misc_feature (825)..(825): n is a, c, g, or t
  misc_feature (839)..(839): n is a, c, g, or t
  misc_feature (886)..(886): n is a, c, g, or t
  misc_feature (903)..(903): n is a, c, g, or t
  misc_feature (925)..(925): n is a, c, g, or t
  misc_feature (937)..(937): n is a, c, g, or t
  misc_feature (941)..(941): n is a, c, g, or t
  misc_feature (944)..(944): n is a, c, g, or t
  misc_feature (959)..(959): n is a, c, g, or t
  misc_feature (963)..(963): n is a, c, g, or t
  misc_feature (965)..(965): n is a, c, g, or t
  misc_feature (971)..(971): n is a, c, g, or t
  misc_feature (989)..(989): n is a, c, g, or t
  misc_feature (991)..(991): n is a, c, g, or t
  misc_feature (993)..(993): n is a, c, g, or t
  misc_feature (996)..(996): n is a, c, g, or t
  misc_feature (1006)..(1006): n is a, c, g, or t
  misc_feature (1024)..(1024): n is a, c, g, or t
  misc_feature (1033)..(1033): n is a, c, g, or t
  misc_feature (1046)..(1046): n is a, c, g, or t
  misc_feature (1057)..(1057): n is a, c, g, or t
  misc_feature (1059)..(1059): n is a, c, g, or t
  misc_feature (1063)..(1063): n is a, c, g, or t
  misc_feature (1065)..(1065): n is a, c, g, or t
  misc_feature (1076)..(1077): n is a, c, g, or t
  misc_feature (1095)..(1095): n is a, c, g, or t
  misc_feature (1100)..(1100): n is a, c, g, or t
  misc_feature (1106)..(1108): n is a, c, g, or t
  misc_feature (1131)..(1131): n is a, c, g, or t
  misc_feature (1139)..(1139): n is a, c, g, or t
  misc_feature (1143)..(1146): n is a, c, g, or t
  misc_feature (1153)..(1153): n is a, c, g, or t
  misc_feature (1175)..(1175): n is a, c, g, or t
gccggaggagaacgggcggagggcgcgggccgaccgggcgcaccgaccatggcctccaaatgccccaagtgcgacaagaccgtgtacttcgccgagaaggtgagctccctggggaaggactggcacaagttctgcctcaagtgcgagcgctgcagcaagacgctgacgcccgggggccacgccgagcatgacgggaagccgttctgccacaagccgtgctacgccaccctgttcggacccaaaggcgtgaacatcgggggcgcgggctcctacatctacgagaagcccctggcggaggggccgcaggtcaccggccccatcgaggtccccgcggcccgagcagaggagcggaaggcgagcggccccccgaaggggcccagcagagcctccagtgtcaccactttcaccggggagcccaacacgtgcccgcgctgcagcaagaaggtgtacttcgctgagaaggtgacgtctctgggcaaggattggcaccggccctgcctgcgctgcgagcgctgcgggaagacactgacccccggcgggcacgcggagcacgacggccagccctactgccacaagccctgctatggaatcctcttcggacccaagggagtgaacaccggtgcggtgggcagctacatctatgaccgggaccccgaaggcaaggtccagccctangctacagcggctctcatgatgtgggctcacctgcgccccagacctgcangggcccccctgcttggctctgctgggagagtgctcagccgcccagtcctgcctgcaagcccagggcgagtattggaggagggcagccacgggcagancacnatgcccatcccgantctctggtgtgtctgcccctctggcatctctgggcgtccatgatccntttgtgtctgcgtgtcnaatccccgtgtgacctgtccancatttttccccnaacntgngtgtcccgtgggctntcgntntccttnttgttgccaccactgcantntnttntgctcctttnggggaggcccccttccangtctggaanggttcctcggatnctgctgggcantntctnangctccccctanngtcctgtttaactttggnaaaangttaannnaaaaaaaaaaaagggccccctanggcaaaantttnnnntggcctntaaacaaagccaactttttttnacccttccggttttt

SEQ ID NO: 52 - DNA, 1087 bp, Homo sapiens
  misc_feature (608)..(608): n is a, c, g, or t
  misc_feature (629)..(629): n is a, c, g, or t
  misc_feature (647)..(647): n is a, c, g, or t
  misc_feature (708)..(708): n is a, c, g, or t
  misc_feature (752)..(752): n is a, c, g, or t
  misc_feature (758)..(758): n is a, c, g, or t
  misc_feature (801)..(801): n is a, c, g, or t
  misc_feature (868)..(868): n is a, c, g, or t
  misc_feature (870)..(870): n is a, c, g, or t
  misc_feature (875)..(875): n is a, c, g, or t
  misc_feature (900)..(900): n is a, c, g, or t
  misc_feature (910)..(910): n is a, c, g, or t
  misc_feature (921)..(921): n is a, c, g, or t
  misc_feature (924)..(924): n is a, c, g, or t
  misc_feature (929)..(929): n is a, c, g, or t
  misc_feature (933)..(933): n is a, c, g, or t
  misc_feature (944)..(944): n is a, c, g, or t
  misc_feature (946)..(946): n is a, c, g, or t
  misc_feature (948)..(948): n is a, c, g, or t
  misc_feature (950)..(950): n is a, c, g, or t
  misc_feature (955)..(955): n is a, c, g, or t
  misc_feature (971)..(971): n is a, c, g, or t
  misc_feature (974)..(974): n is a, c, g, or t
  misc_feature (980)..(980): n is a, c, g, or t
  misc_feature (982)..(982): n is a, c, g, or t
  misc_feature (994)..(994): n is a, c, g, or t
  misc_feature (1017)..(1017): n is a, c, g, or t
  misc_feature (1021)..(1021): n is a, c, g, or t
  misc_feature (1027)..(1028): n is a, c, g, or t
  misc_feature (1030)..(1030): n is a, c, g, or t
  misc_feature (1045)..(1045): n is a, c, g, or t
  misc_feature (1051)..(1051): n is a, c, g, or t
  misc_feature (1055)..(1055): n is a, c, g, or t
  misc_feature (1076)..(1077): n is a, c, g, or t
  misc_feature (1079)..(1079): n is a, c, g, or t
  misc_feature (1084)..(1084): n is a, c, g, or t
ggccgcgcgtgggcatccacgggcgccgagcctccgtccgtgtctctatccctcccgggcctttgtcagcgcgcccgctgggagcggggccgagagcgccggttccagtcagacagccccgcaggtcagcggccgggccgagggcgccagagggggccatgtcgtaccagggcaagaagagcatcccgcacatcacgagtgaccgactcctcatcaaaggtggacggatcatcaacgatgaccaatccctttatgctgacgtctacctggaggatggacttatcaaacaaataggagagaacttaatcgttcctggtggagtgaagaccattgaagccaacgggcggatggttattcccggaggtattgatgtcaacacgtacctgcagaagccctcccaggggatgactgcggctgatgacttcttccaagggaccagggcggcactggtgggcgggaccacgatgatcattgaccatgttgttcctgaacctgggtccagcctactgacctctttcgagaagtggcacgaagcagctgacaccaaatcctgctgtgattactccctccacgtggacatcacaagctggtacgatggcgttcgggangagctggaggtgctggtgcangacaaaggcgtcaattcnttccaagtctacatggcctataaggatgtctaccaaatgtccgacagccagctctatgaancctttaccttccttaaagggcctgggagctgtgaatcttggtcnatgcanaaaatggagatttgatagctcaggaacaaaagcggatcctggnaaatgggcattcacggggtcccgagggccatggcccttgaacaaaacttgaaaaaactgggaggccnangccgntgtttccgggccaatcaccaattgnggggccggantaaactgcccntgngttanttcncccaaggtcangnancnaagantgcacccaaaattttnccntttggncnaaaaaaaaaggnccctaattttttggaaaaacccntttncccccnncntggggaaccaatggnccccanttantgggaacaaaattggccaagnngnggggnttt

SEQ ID NO: 53 - DNA, 1146 bp, Homo sapiens
  misc_feature (713)..(713): n is a, c, g, or t
  misc_feature (792)..(792): n is a, c, g, or t
  misc_feature (795)..(795): n is a, c, g, or t
  misc_feature (847)..(847): n is a, c, g, or t
  misc_feature (898)..(898): n is a, c, g, or t
  misc_feature (906)..(906): n is a, c, g, or t
  misc_feature (914)..(914): n is a, c, g, or t
  misc_feature (927)..(927): n is a, c, g, or t
  misc_feature (933)..(933): n is a, c, g, or t
  misc_feature (938)..(938): n is a, c, g, or t
  misc_feature (955)..(955): n is a, c, g, or t
  misc_feature (958)..(958): n is a, c, g, or t
  misc_feature (970)..(970): n is a, c, g, or t
  misc_feature (981)..(981): n is a, c, g, or t
  misc_feature (983)..(983): n is a, c, g, or t
  misc_feature (986)..(986): n is a, c, g, or t
  misc_feature (993)..(993): n is a, c, g, or t
  misc_feature (1014)..(1014): n is a, c, g, or t
  misc_feature (1017)..(1017): n is a, c, g, or t
  misc_feature (1023)..(1023): n is a, c, g, or t
  misc_feature (1031)..(1031): n is a, c, g, or t
  misc_feature (1038)..(1038): n is a, c, g, or t
  misc_feature (1040)..(1040): n is a, c, g, or t
  misc_feature (1046)..(1046): n is a, c, g, or t
  misc_feature (1050)..(1050): n is a, c, g, or t
  misc_feature (1057)..(1057): n is a, c, g, or t
  misc_feature (1059)..(1059): n is a, c, g, or t
  misc_feature (1063)..(1063): n is a, c, g, or t
  misc_feature (1074)..(1074): n is a, c, g, or t
  misc_feature (1083)..(1083): n is a, c, g, or t
  misc_feature (1087)..(1087): n is a, c, g, or t
  misc_feature (1098)..(1098): n is a, c, g, or t
  misc_feature (1100)..(1100): n is a, c, g, or t
  misc_feature (1113)..(1113): n is a, c, g, or t
  misc_feature (1117)..(1117): n is a, c, g, or t
  misc_feature (1125)..(1125): n is a, c, g, or t
  misc_feature (1127)..(1127): n is a, c, g, or t
  misc_feature (1131)..(1131): n is a, c, g, or t
  misc_feature (1133)..(1133): n is a, c, g, or t
  misc_feature (1139)..(1139): n is a, c, g, or t
  misc_feature (1141)..(1141): n is a, c, g, or t
  misc_feature (1143)..(1143): n is a, c, g, or t
  misc_feature (1145)..(1145): n is a, c, g, or t
gggttagaaggcacaggtggcgagatgagccgggtaccagcgttcctgagcgcggccgaggtggaggaacacctccgcagctccagcctcctcatcccgcctctagagacggccctggccaacttctccagcggtcccgaaggaggggtcatgcagcccgtgcgcaccgtggtgccggtgaccaagcacaggggctacctgggggtcatgcccgcctacagtgctgcagaggatgcactgaccaccaagttggtcaccttctacgaggaccgcggcatcacctcggtcgtcccttcccaccaggctactgtgctactctttgagcccagcaatggcaccctgctggcggtcatggatggaaatgtcataactgcaaagagaacagctgcagtttctgccattgccaccaagtttctgaaacctcccagcagtgaagtgctgtgcatccttggggctggggtccaggcctacagccattatgagatcttcacagagcagttctcctttaaggaggtgaggatatggaaccgcaccaaagaaaatgcagagaagtttgcagacacagtgcaaggagaggtacgggtctgttcttcggtccaggaggctgtggcaggtgcagatgtgatcatcacagtcaccctggcaacagagcccattttgtttggtgaatgggtgaagccaggggctcacatcaatgctgttggagccagcanacctgactggagagaactggatgatgagctcatgaaagaagctgtgctgtacgtggattcccaggaggctgccctgaangantctggagatgtcctgctgtcaggggccgagatctttgctgaactgggaaaantgattaagggagtgaaaccagcccactgtgaaaaaaaccacggtgttcaantctttggnaatggcantggaaaaaaacanttgcanccaanctcatctatgaattccnggncatctggtaaanaaaaaaaaagnanttngattttnaaaatggatgcttgaagaaanatngctgcngggttccnaaaattntnaaaaanaaantgaaggnantccngtcccccaggnaactccccntttngggcttaacangntttacccttaaanggcngaaatccncntttntnttttgnantngna

SEQ ID NO: 54 - DNA, 850 bp, Homo sapiens
gccctccagcccagcctcgctagctccgcctgcggtacgtgctcccgcctccgactcaaaatgcctgtctggggaggtggaaacaagtgtggggcctgtgggaggaccgtgtaccacgcagaagaggtgcagtgtgatggcaggagcttccaccgctgctgctttctctgcatggtttgcaggaaaaatttagatagcacaacagtggcaattcacgatgaagagatctactgcaaatcctgctacggaaagaagtatgggccaaaaggctacggttatggccagggcgctggcacgcttaacatggaccgtggcgagaggctgggcatcaaaccagagagtgttcagcctcacaggcctacaacaaatccaaacacttctaaatttgctcagaaatatggaggtgctgagaagtgttccagatgtggggattctgtatatgctgccgagaagataattggagctggaaagccctggcacaaaaactgtttccgatgtgcaaagtgtgggaagagtcttgaatcaacaactctgactgaaaaagaaggtgaaatctattgtaaaggatgctatgcaaagaactttgggcccaagggatttggctatggccaaggagcaggggctcttgttcatgcccagtaagatgtaaaccctgaactaaacatcacacactgagaatctcttcataatctaggcacagataatctttaacactaaactactgtgaaattctaccagcattaagtactgtatatcgccctgtacttggataggctggctaactcgtaggaagagagcactgtatggtatccttttgctttattcaccagcattttgggggaacatttct

SEQ ID NO: 55 - DNA, 695 bp, Homo sapiens
gggcggcgaaggccggaagggataaaaccgcagtcgccggcctcgcggggctcacggcctcgcctcggtatcgcagcgggtcctctctatctagctccagcctctcgcctgcgccccactccccgcgtcccgcgtcctagccgaccatggccgggcccctgcgcgccccgctgctcctgctggccatcctggccgtggccctggccgtgagccccgcggccggctccagtcccggcaagccgccgcgcctggtgggaggccccatggacgccagcgtggaggaggagggtgtgcggcgtgcactggactttgccgtcggcgagtacaacaaagccagcaacgacatgtaccacagccgcgcgctgcaggtggtgcgcgcccgcaagcagatcgtagctggggtgaactacttcttggacgtggagctgggccgaaccacgtgtaccaagacccagcccaacttggacaactgccccttccatgaccagccacatctgaaaaggaaagcattctgctctttccagatctacgctgtgccttggcagggcacaatgaccttgtcgaaatccacctgtcaggacgcctaggggtctgtaccgggctggcctgtgcctatcacctcttatgcacacctcccaccccctgtattcccacccctggactggtggcccctgccttggggaaaggtctccccc

SEQ ID NO: 56 - DNA, 1102 bp, Homo sapiens
  misc_feature (582)..(582): n is a, c, g, or t
  misc_feature (629)..(629): n is a, c, g, or t
  misc_feature (697)..(697): n is a, c, g, or t
  misc_feature (707)..(707): n is a, c, g, or t
  misc_feature (709)..(709): n is a, c, g, or t
  misc_feature (736)..(736): n is a, c, g, or t
  misc_feature (781)..(781): n is a, c, g, or t
  misc_feature (806)..(806): n is a, c, g, or t
  misc_feature (809)..(809): n is a, c, g, or t
  misc_feature (878)..(878): n is a, c, g, or t
  misc_feature (880)..(880): n is a, c, g, or t
  misc_feature (888)..(888): n is a, c, g, or t
  misc_feature (890)..(890): n is a, c, g, or t
  misc_feature (896)..(896): n is a, c, g, or t
  misc_feature (900)..(900): n is a, c, g, or t
  misc_feature (902)..(902): n is a, c, g, or t
  misc_feature (910)..(910): n is a, c, g, or t
  misc_feature (920)..(920): n is a, c, g, or t
  misc_feature (922)..(922): n is a, c, g, or t
  misc_feature (932)..(932): n is a, c, g, or t
  misc_feature (938)..(938): n is a, c, g, or t
  misc_feature (945)..(945): n is a, c, g, or t
  misc_feature (950)..(950): n is a, c, g, or t
  misc_feature (959)..(959): n is a, c, g, or t
  misc_feature (965)..(966): n is a, c, g, or t
  misc_feature (973)..(973): n is a, c, g, or t
  misc_feature (978)..(978): n is a, c, g, or t
  misc_feature (996)..(996): n is a, c, g, or t
  misc_feature (1004)..(1004): n is a, c, g, or t
  misc_feature (1013)..(1013): n is a, c, g, or t
  misc_feature (1030)..(1031): n is a, c, g, or t
  misc_feature (1036)..(1038): n is a, c, g, or t
  misc_feature (1042)..(1042): n is a, c, g, or t
  misc_feature (1045)..(1045): n is a, c, g, or t
  misc_feature (1051)..(1051): n is a, c, g, or t
  misc_feature (1067)..(1067): n is a, c, g, or t
  misc_feature (1071)..(1071): n is a, c, g, or t
  misc_feature (1079)..(1079): n is a, c, g, or t
  misc_feature (1083)..(1083): n is a, c, g, or t
  misc_feature (1087)..(1087): n is a, c, g, or t
ggctgcctgcaagcttcgatgcacgggaacaatggccacagtgtcccaccatcaaagagatcagagaccagggctcctgtggctcctgctgggccttcggggctgtggaagccatctctgaccggatctgcatccacaccaatgcgcacgtcagcgtggaggtgtcggcggaggacctgctcacatgctgtggcagcatgtgtggggacggctgtaatggtggctatcctgctgaagcttggaacttctggacaagaaaaggcctggtttctggtggcctctatgaatcccatgtagggtgcagaccgtactccatccctccctgtgagcaccacgtcaacggctcccggcccccatgcacgggggagggagatacccccaagtgtagcaagatctgtgagcctggctacagcccgacctacaaacaggacaagcactacggatacaattcctacagcgtctccaatagcgagaaggacatcatggccgagatctacaaaaacggccccgtggagggagctttctctgtgtattcggacttcctgctctacaagtcaggagtgtaccaacacgtcaccgganagatgatgggtggccatgccatccgcatcctgggctggggagtgganaatggcacaccctactggctggttgccaactccctggaacactgactggggtgacaatggcttctttnaaatactcanangacaggatcactgtggaatcgaatcanaagtggtggctggaattccacgcaccgatcagtactggggaaaanatctaatctgccgtgggccttgtcntgncaatccctgggggcgaaatcggggtaaaaatgcattttattctttaagttcacgtaaaaaacaagtttnangcagggtntnaaagantggnantggccaanatcaaacctntnttccaaaganaacaantcctggntaatnccaacctgnggttanntgcaaanagccntttgaaaccaccctttcnaaaaaaanggttctttncccctgtaaaaaatgcnntaagnnnactnctncccacnaattgggccccccccngtancttccctncccnggancaaaaaaaacccgga

SEQ ID NO: 57 - DNA, 1170 bp, Homo sapiens
  misc_feature (807)..(807): n is a, c, g, or t
  misc_feature (850)..(850): n is a, c, g, or t
  misc_feature (862)..(862): n is a, c, g, or t
  misc_feature (874)..(874): n is a, c, g, or t
  misc_feature (877)..(877): n is a, c, g, or t
  misc_feature (881)..(881): n is a, c, g, or t
  misc_feature (918)..(918): n is a, c, g, or t
  misc_feature (965)..(965): n is a, c, g, or t
  misc_feature (967)..(967): n is a, c, g, or t
  misc_feature (974)..(974): n is a, c, g, or t
  misc_feature (983)..(983): n is a, c, g, or t
  misc_feature (994)..(994): n is a, c, g, or t
  misc_feature (1000)..(1000): n is a, c, g, or t
  misc_feature (1007)..(1007): n is a, c, g, or t
  misc_feature (1020)..(1020): n is a, c, g, or t
  misc_feature (1023)..(1023): n is a, c, g, or t
  misc_feature (1025)..(1026): n is a, c, g, or t
  misc_feature (1037)..(1038): n is a, c, g, or t
  misc_feature (1056)..(1056): n is a, c, g, or t
  misc_feature (1062)..(1062): n is a, c, g, or t
  misc_feature (1064)..(1064): n is a, c, g, or t
  misc_feature (1080)..(1080): n is a, c, g, or t
  misc_feature (1082)..(1083): n is a, c, g, or t
  misc_feature (1085)..(1085): n is a, c, g, or t
  misc_feature (1095)..(1095): n is a, c, g, or t
  misc_feature (1117)..(1117): n is a, c, g, or t
  misc_feature (1121)..(1121): n is a, c, g, or t
  misc_feature (1124)..(1124): n is a, c, g, or t
  misc_feature (1129)..(1129): n is a, c, g, or t
  misc_feature (1143)..(1143): n is a, c, g, or t
  misc_feature (1153)..(1153): n is a, c, g, or t
  misc_feature (1161)..(1161): n is a, c, g, or t
  misc_feature (1166)..(1166): n is a, c, g, or t
  misc_feature (1168)..(1168): n is a, c, g, or t
ggcacaacccatggctgcgctgggctgcgcgaggctgaggtgggcgctgcgaggggccggccgtggcctctgcccccacggggccagagccaaggccgcgatccctgccgccctcccctcggacaaggccaccggagctcccggagccgggcctggtgtccggcggcggcaacggagcttagaggagattccacgtctaggacagctgcgcttcttctttcagctgttcgttcaaggctatgccctgcaactgcaccagttacaggtgctttacaaggccaagtacggtccaatgtggatgtcctacttagggcctcagatgcacgtgaacctggccagtgccccgctcttggagcaagtgatgcggcaagagggcaagtacccagtacggaacgacatggagctatggaaggagcaccgggaccagcacgacctgacctatgggccgttcaccacggaaggacaccactggtaccagctgcgccaggctctgaaccagcggttgctgaagccagcggaagcagcgctctatacggatgctttcaatgaggtgattgatgactttatgactcgactggaccagctgcgggcagagagtgcttcggggaaccaggtgtcggacatggctcaactcttctactactttgccttggaagctatttgctacatcctgttcgagaaacgcattggctgcctgcagcgatccatccccgaggacaccgtgaccttcgtcagatccatcgggttaatgttccagaactcactctatgccaccttcctccccaagtggactcgccccgtgctgcntttctggaagcgatacctggatggttggaatgccatcttttcntttgggaaaaanctgattgatganaanctcnaaaatatggaaggcccaactgcaggcagcagggccanatggcatccaaggtgtctggctacctgcacttcttactggccagtgnanagctcantcctcggangccatgggcancctgcntgaactncttatggctggantgnanncaaatccaaannctgaaatgggccctgtancccctntnaaagaacctgaaatcnannangccttttccnaaaaaatggtgggtgggggtcnaccnggnaaatncccaacaaaagaantttcccaatnccgttttnaaaantntt

SEQ ID NO: 58 - DNA, 886 bp, Homo sapiens
  misc_feature (583)..(583): n is a, c, g, or t
  misc_feature (637)..(637): n is a, c, g, or t
  misc_feature (654)..(654): n is a, c, g, or t
  misc_feature (672)..(672): n is a, c, g, or t
  misc_feature (693)..(693): n is a, c, g, or t
  misc_feature (705)..(705): n is a, c, g, or t
  misc_feature (720)..(720): n is a, c, g, or t
  misc_feature (747)..(747): n is a, c, g, or t
  misc_feature (767)..(767): n is a, c, g, or t
  misc_feature (775)..(775): n is a, c, g, or t
  misc_feature (785)..(785): n is a, c, g, or t
  misc_feature (791)..(791): n is a, c, g, or t
  misc_feature (800)..(800): n is a, c, g, or t
  misc_feature (807)..(807): n is a, c, g, or t
  misc_feature (812)..(812): n is a, c, g, or t
  misc_feature (820)..(820): n is a, c, g, or t
  misc_feature (825)..(826): n is a, c, g, or t
  misc_feature (828)..(829): n is a, c, g, or t
  misc_feature (832)..(833): n is a, c, g, or t
  misc_feature (837)..(837): n is a, c, g, or t
  misc_feature (845)..(845): n is a, c, g, or t
  misc_feature (849)..(849): n is a, c, g, or t
  misc_feature (852)..(853): n is a, c, g, or t
  misc_feature (864)..(864): n is a, c, g, or t
  misc_feature (873)..(873): n is a, c, g, or t
  misc_feature (877)..(877): n is a, c, g, or t
  misc_feature (882)..(882): n is a, c, g, or t
  misc_feature (885)..(885): n is a, c, g, or t
gagcgggccctggatgaggtcacctcctcgcagcctccaccactgccaccgccacccccaccagcccaagagacccaggagcccagccccatcctagacagtgaggagaccagagcagcagcccctcaggcctgggccggccccatggaggagccccctcaggcacaggcgcctccccgggggccaggcagccctgcagaggacttgatgttcatggagtctgcagagcaggctgtcctggctgctcccgtggagcctgccacagctgacgccacggaggtccacgatgcagctgacaccattgaaactgacactgccactgctgacaccactgttgccaacaacgtaccccccgccgccaccagcctcattgacctatggcctggcaacggggaaggggcctccacactccagggtgagcccagggcccccacgccaccctcgggtactgaggtcaccctggcagaggtgcccctgctggatgaggtggctccggagccactgctgccagcaggcgaaggctgtgccacccttctcaactttgatgagctgcctgagccgccagccaccttctgtgacccanaggaagtggaaggggagcccctggctgccccccagaccccaactctgccctcancccttgaggagctggancaagagcaggagccgganccccacctgctaaccaatggngagaccacccanaaggaggggacccangccagtgaggggtacttcagtcaatcncaggaggaggagtttgcccnatcggaanagctctgtgncaaggntccgcctcntgtgttntaaanagcctccnaaatnnanntcnnatgntgggatgnaaanccnnttccaaaaaanaagaagggnttcnagggnggng

SEQ ID NO: 59 - DNA, 415 bp, Homo sapiens
gcccacgcgtccgcccacgcgtccgggcggcggagcgtgccctgcagctggggctgctcttcccgccggcggaggccctgcaggtgggcatagtggaccaggtggtcccggaggagcaggtgcagagcactgcgctgtcagcgatagcccagtggatggccattccagaccatgctcgacagctgaccaaggccatgatgcgaaaggccacggccagccgcctggtcacgcagcgcgatgcggacgtgcagaacttcgtcagcttcatctccaaagactccatccagaagtccctgcagatgtacttagagaggctcaaagaagaaaaaggctaacgattgggctgccacaggcttacggccacacgtgcccctgtgggtcccagggaggtcttaaacaaggtatttttcaactt

SEQ ID NO: 60 - DNA, 1086 bp, Homo sapiens
  misc_feature (751)..(751): n is a, c, g, or t
  misc_feature (841)..(841): n is a, c, g, or t
  misc_feature (847)..(847): n is a, c, g, or t
  misc_feature (888)..(888): n is a, c, g, or t
  misc_feature (896)..(896): n is a, c, g, or t
  misc_feature (902)..(902): n is a, c, g, or t
  misc_feature (915)..(915): n is a, c, g, or t
  misc_feature (935)..(935): n is a, c, g, or t
  misc_feature (950)..(950): n is a, c, g, or t
  misc_feature (969)..(969): n is a, c, g, or t
  misc_feature (984)..(984): n is a, c, g, or t
  misc_feature (1009)..(1009): n is a, c, g, or t
  misc_feature (1011)..(1011): n is a, c, g, or t
  misc_feature (1015)..(1015): n is a, c, g, or t
  misc_feature (1017)..(1017): n is a, c, g, or t
  misc_feature (1024)..(1024): n is a, c, g, or t
  misc_feature (1041)..(1041): n is a, c, g, or t
  misc_feature (1052)..(1052): n is a, c, g, or t
  misc_feature (1060)..(1060): n is a, c, g, or t
  misc_feature (1063)..(1063): n is a, c, g, or t
  misc_feature (1068)..(1068): n is a, c, g, or t
  misc_feature (1073)..(1073): n is a, c, g, or t
  misc_feature (1082)..(1082): n is a, c, g, or t
  misc_feature (1084)..(1084): n is a, c, g, or t
gcccacgcgtccgcccacgcgtccgcttccccagagacacctgattcttctgcttcaaaagtcctcaaaagagagggaactgatacaactgcaaagactagcaaactgcggggactgaagcctaagaagaccacaactcggcgacccaagcccacgcgcccagccagtactggggtggctggggccagtagctccctgggcccctctggctcagcgtcagcaggtgagctgagcagcagtgagcccagcaccccggctcagactccgctggcagcacccatcatccccacgccggtcctcacctctcctggagcagtccccccgcttccttccccatccaaggaggaggagggactaagggctcaggtgcgggacctggaggagaaactagagaccctgagactgaaacgggcagaagacaaagcaaagctaaaagagctggagaaacacaaaatccagctggagcaggtgcaggaatggaagagcaaaatgcaggagcagcaggccgacctgcagcggcgcctcaaggaggcgagaaaggaagccaaggaggcgctggaggcaaaggaacgctatatggaggagatggctgatactgctgatgccattgagatggccactttggacaaggagatggctgaagagcgggctgagtccctgcagcaggaggtggaggcactgaaggagcgggtggacgagctcactactgacttagagatcctcaaggctgagattgaagagaagggctcanatggcgctgcatccagttatcagctcaagcagcttgaggagcagaatgcccgcctgaaggatgccctggtgaggatgcgggatctttctncctcanagaagcaggagcatgtgagctccaaagctcatggaaaaaanaaccaaanctgganttgtgaggcacancgggagcgtctgcaggaganctaaccaggcaaaancaccttgatgactcaggancagtggatgctgctntggtgctaagaaatggtgaaatttnanaatngnacctganttggaaaaaaatgcccnatttagggaantggggaanttnaaccntaatnaataaaaanantt

SEQ ID NO: 61 - DNA, 1090 bp, Homo sapiens
  misc_feature (773)..(773): n is a, c, g, or t
  misc_feature (787)..(787): n is a, c, g, or t
  misc_feature (856)..(856): n is a, c, g, or t
  misc_feature (875)..(875): n is a, c, g, or t
  misc_feature (897)..(897): n is a, c, g, or t
  misc_feature (921)..(921): n is a, c, g, or t
  misc_feature (925)..(925): n is a, c, g, or t
  misc_feature (933)..(933): n is a, c, g, or t
  misc_feature (955)..(955): n is a, c, g, or t
  misc_feature (962)..(962): n is a, c, g, or t
  misc_feature (969)..(969): n is a, c, g, or t
  misc_feature (971)..(971): n is a, c, g, or t
  misc_feature (983)..(983): n is a, c, g, or t
  misc_feature (986)..(986): n is a, c, g, or t
  misc_feature (995)..(996): n is a, c, g, or t
  misc_feature (1002)..(1002): n is a, c, g, or t
  misc_feature (1006)..(1006): n is a, c, g, or t
  misc_feature (1014)..(1014): n is a, c, g, or t
  misc_feature (1018)..(1018): n is a, c, g, or t
  misc_feature (1020)..(1021): n is a, c, g, or t
  misc_feature (1027)..(1027): n is a, c, g, or t
  misc_feature (1035)..(1036): n is a, c, g, or t
  misc_feature (1050)..(1050): n is a, c, g, or t
  misc_feature (1052)..(1053): n is a, c, g, or t
  misc_feature (1060)..(1060): n is a, c, g, or t
  misc_feature (1063)..(1063): n is a, c, g, or t
  misc_feature (1069)..(1069): n is a, c, g, or t
  misc_feature (1074)..(1075): n is a, c, g, or t
  misc_feature (1084)..(1084): n is a, c, g, or t
  misc_feature (1086)..(1086): n is a, c, g, or t
gctggaaagaagtttggaaaccctggggagaaattagttaaaaagaagtggaatcttgatgagctgcctaaatttgagaagaatttttatcaagagcaccctgatttggctaggcgcacagcacaagaggtggaaacatacagaagaagcaaggaaattacagttagaggtcacaactgcccgaagccagttctaaatttttatgaagccaatttccctgcaaatgtcatggatgttattgcaagacagaatttcactgaacccactgctattcaagctcagggatggccagttgctctaagtggattggatatggttggagtggcacagactggatctgggaaaacattgtcttatttgcttcctgccattgtccacatcaatcatcagccattcctagagagaggcgatgggcctatttgtttggtgctggcaccaactcgggaactggcccaacaggtgcagcaagtagctgctgaatattgtagagcatgtcgcttgaagtctacttgtatctacggtggtgctcctaagggaccacaaatacgtgatttggagagaggtgtggaaatctgtattgcaacacctggaagactgattgactttttagagtgtggaaaaaccaatctgagaagaacaacctaccttgtccttgatgaagcagatagaatgcttgatatgggctttgaaccccaaataaggaagattgtggatcaaataagacctgataggcaaactctaatgtggagtgcgacttggccaaaagaaataanacagcttgctgaanatttcctgaaagactatattcatataaacattggtgcacttgaactgagtgcaaacccacaacattctncaaatgtggatgtgtgtcntgacgtaaaaaaggatgaaaancttatcctctaatggaaaaaatcntgantgaaaagnaaaataaaaccttgttttttgngaaaccnaaaaaanangtgatgaccttnccnaaaaatgannaaaaangggngcccgccntggntnncctggngacaaaanncaaaaaaaacgggncnngggttcnaanggaatncaacnnggaaaaccncnattt

SEQ ID NO: 62 - DNA, 1027 bp, Homo sapiens
  misc_feature (755)..(755): n is a, c, g, or t
  misc_feature (821)..(821): n is a, c, g, or t
  misc_feature (824)..(824): n is a, c, g, or t
  misc_feature (832)..(832): n is a, c, g, or t
  misc_feature (878)..(878): n is a, c, g, or t
  misc_feature (889)..(889): n is a, c, g, or t
  misc_feature (895)..(895): n is a, c, g, or t
  misc_feature (899)..(899): n is a, c, g, or t
  misc_feature (903)..(903): n is a, c, g, or t
  misc_feature (907)..(907): n is a, c, g, or t
  misc_feature (920)..(920): n is a, c, g, or t
  misc_feature (923)..(923): n is a, c, g, or t
  misc_feature (925)..(925): n is a, c, g, or t
  misc_feature (929)..(929): n is a, c, g, or t
  misc_feature (935)..(935): n is a, c, g, or t
  misc_feature (937)..(937): n is a, c, g, or t
  misc_feature (944)..(944): n is a, c, g, or t
  misc_feature (983)..(983): n is a, c, g, or t
  misc_feature (985)..(986): n is a, c, g, or t
  misc_feature (993)..(993): n is a, c, g, or t
  misc_feature (1003)..(1003): n is a, c, g, or t
  misc_feature (1009)..(1009): n is a, c, g, or t
  misc_feature (1011)..(1011): n is a, c, g, or t
  misc_feature (1014)..(1014): n is a, c, g, or t
  misc_feature (1019)..(1019): n is a, c, g, or t
  misc_feature (1022)..(1022): n is a, c, g, or t
  misc_feature (1026)..(1026): n is a, c, g, or t
gcccacgcgtccgatccaccacgagctgctggcctacctatactcctcggcagaccagagcagcctcatggaggagtcggctgaccaggcacagcggcgggacgacatgctgcgcatgtaccatgccctcaaggaggcgctcaacatcatcggtgacatcagcaccagcactgtgtccacgcctgtacccccgcctgtcgatgacacctggctccagagcgccagcagccacagccccactccacagcgccgaccggtgtccagcatacacccccctggccggcccccagcagtgaggggccccactccagggccccccctgattcctgttcccgtgggggcagcagcctccttctcggcgcccccaatcccatcccggcctggaccccagagcgtgtttgccaacagtgacctcttcccagccccgcctcagatcccatctcggccagttcggatccccccagggattcccccaggagtgcccagcagaagaccccctgctgcgcccagccggcccaccattatccgcccagccgagccatccctgctcgactaggcctcgaggggggcgtgctctcgggggggcctcacgcacccgcggcgcaggagcttcagtggtctggggccctccgccgcccctatgctgggaccaggctcccagtgggcagccctggcctcttccttaacgctggccccggtccagggccggcccctgtgcctggctggacaccgcactgcgcaaaggggccctgganctccaggcagggggcgctggggtgttgcactttgggggatggagtcttcagggtggcaaagggggnacnaaaacccnttgaaaccatcctgaaatgaggggtccagcttgggggggaatttancaaggtttttnttgggntggnaaancccntgtagggaaggcnttntntaantggggnancaagggncctaaattcccaggccttgttggggggaagggttatttnanntttccantaaaaggaantccccnanggnaaacntgnccant

SEQ ID NO: 63 - DNA, 1004 bp, Homo sapiens
  misc_feature (753)..(753): n is a, c, g, or t
  misc_feature (784)..(784): n is a, c, g, or t
  misc_feature (801)..(801): n is a, c, g, or t
  misc_feature (843)..(843): n is a, c, g, or t
  misc_feature (851)..(851): n is a, c, g, or t
  misc_feature (854)..(854): n is a, c, g, or t
  misc_feature (874)..(874): n is a, c, g, or t
  misc_feature (893)..(893): n is a, c, g, or t
  misc_feature (904)..(904): n is a, c, g, or t
  misc_feature (910)..(910): n is a, c, g, or t
  misc_feature (916)..(916): n is a, c, g, or t
  misc_feature (928)..(928): n is a, c, g, or t
  misc_feature (942)..(942): n is a, c, g, or t
  misc_feature (946)..(946): n is a, c, g, or t
  misc_feature (950)..(950): n is a, c, g, or t
  misc_feature (953)..(953): n is a, c, g, or t
  misc_feature (958)..(959): n is a, c, g, or t
  misc_feature (963)..(963): n is a, c, g, or t
  misc_feature (971)..(971): n is a, c, g, or t
  misc_feature (983)..(983): n is a, c, g, or t
  misc_feature (986)..(986): n is a, c, g, or t
  misc_feature (988)..(988): n is a, c, g, or t
  misc_feature (991)..(991): n is a, c, g, or t
  misc_feature (1002)..(1002): n is a, c, g, or t
gggcgcggggctctcatagtgctggagggcgtggaccgcgccgggaagagcacgcagagccgcaagctggtggaagcgctgtgcgccgcgggccaccgcgccgaactgctccggttcccggaaagatcaactgaaatcggcaaacttctgagttcctacttgcaaaagaaaagtgacgtggaggatcactcggtgcacctgcttttttctgcaaatcgctgggaacaagtgccgttaattaaggaaaagttgagccagggcgtgaccctcgtcgtggacagatacgcattttctggtgtggccttcaccggtgccaaggagaatttttccctagactggtgtaaacagccagacgtgggccttcccaaacccgacctggtcctgttcctccagttacagctggcggatgctgccaagcggggagcgtttggccatgagcgctatgagaacggggctttccaggagcgggcgctccggtgtttccaccagctcatgaaagacacgactttgaactggaagatggtggatgcttccaaaagcatcgaagctgtccatgaggacatccgcgtgctctctgaggacgccatccgcactgccacagagaagccgctgggggagctatggaagtgacccaaggctgcccactggagacgcctctccctgcagtcccccgagaggtgggagactcgcggaaggccccgtccccagcggagtccagaccccacaacttcaggagctctttcccggcagcanagatctgcaggctgcctcttctgccccgganctggggtgcactggggnacccccgtggtggggaccttggcagtgtggacatgaacaaancgatggancantctcctgccctctcccctgncctgagggcactctgttgnattttcttacngaagtncatganaactctgaacantttcattgtgatcnctgnaaanggnaatcnnttgnaatttccnaaatgtcttccnaancntantaaaaaaaacntg

SEQ ID NO: 64 - DNA, 1297 bp, Homo sapiens
  misc_feature (854)..(854): n is a, c, g, or t
  misc_feature (868)..(868): n is a, c, g, or t
  misc_feature (873)..(873): n is a, c, g, or t
  misc_feature (876)..(877): n is a, c, g, or t
  misc_feature (896)..(896): n is a, c, g, or t
  misc_feature (898)..(898): n is a, c, g, or t
  misc_feature (901)..(901): n is a, c, g, or t
  misc_feature (904)..(904): n is a, c, g, or t
  misc_feature (917)..(917): n is a, c, g, or t
  misc_feature (923)..(923): n is a, c, g, or t
  misc_feature (926)..(926): n is a, c, g, or t
  misc_feature (943)..(943): n is a, c, g, or t
  misc_feature (960)..(960): n is a, c, g, or t
  misc_feature (984)..(984): n is a, c, g, or t
  misc_feature (987)..(987): n is a, c, g, or t
  misc_feature (990)..(990): n is a, c, g, or t
  misc_feature (999)..(999): n is a, c, g, or t
  misc_feature (1003)..(1003): n is a, c, g, or t
  misc_feature (1014)..(1014): n is a, c, g, or t
  misc_feature (1018)..(1019): n is a, c, g, or t
  misc_feature (1023)..(1024): n is a, c, g, or t
  misc_feature (1053)..(1053): n is a, c, g, or t
  misc_feature (1074)..(1074): n is a, c, g, or t
  misc_feature (1079)..(1079): n is a, c, g, or t
  misc_feature (1092)..(1092): n is a, c, g, or t
  misc_feature (1103)..(1103): n is a, c, g, or t
  misc_feature (1110)..(1110): n is a, c, g, or t
  misc_feature (1121)..(1122): n is a, c, g, or t
  misc_feature (1147)..(1148): n is a, c, g, or t
  misc_feature (1158)..(1159): n is a, c, g, or t
  misc_feature (1161)..(1161): n is a, c, g, or t
  misc_feature (1168)..(1168): n is a, c, g, or t
  misc_feature (1175)..(1175): n is a, c, g, or t
  misc_feature (1181)..(1181): n is a, c, g, or t
  misc_feature (1192)..(1192): n is a, c, g, or t
  misc_feature (1205)..(1205): n is a, c, g, or t
  misc_feature (1217)..(1217): n is a, c, g, or t
  misc_feature (1231)..(1231): n is a, c, g, or t
  misc_feature (1235)..(1235): n is a, c, g, or t
  misc_feature (1238)..(1238): n is a, c, g, or t
  misc_feature (1241)..(1241): n is a, c, g, or t
  misc_feature (1246)..(1246): n is a, c, g, or t
  misc_feature (1253)..(1253): n is a, c, g, or t
  misc_feature (1272)..(1272): n is a, c, g, or t
  misc_feature (1292)..(1292): n is a, c, g, or t
  misc_feature (1295)..(1295): n is a, c, g, or t
gatgccccaggacacagagactttatcaaaaacatgattacagggacatctcaggctgactgtgctgtcctgattgttgctgctggtgttggtgaatttgaagctggtatctccaagaatgggcagacccgagagcatgcccttctggcttacacactgggtgtgaaacaactaattgtcggtgttaacaaaatggattccactgagccaccctacagccagaagagatatgaggaaattgttaaggaagtcagcacttacattaagaaaattggctacaaccccgacacagtagcatttgtgccaatttctggttggaatggtgacaacatgctggagccaagtgctaacatgccttggttcaagggatggaaagtcacccgtaaggatggcaatgccagtggaaccacgctgcttgaggctctggactgcatcctaccaccaactcgtccaactgacaagcccttgcgcctgcctctccaggatgtctacaaaattggtggtattggtactgttcctgttggccgagtggagactggtgttctcaaacccggtatggtggtcacctttgctccagtcaacgttacaacggaagtaaaatctgtcgaaatgcaccatgaagctttgagtgaagctcttcctggggacaatgtgggcttcaatgtcaagaatgtgtctgtcaaggatgttcgtcgtggcaacgttgctggtgacagcaaaaatgacccaccaatggaagcagctggcttcactgctcaggtgattatcctgaaccatccaggccaaataagcgccggctatgccccctgtattggattgccacacggctcacattgcatgcaagttttgctganctgaaggaaaaatngatcnccnnttctggtaaaagctggaananggnccntaaattcttgaantctggngangctgccattgttgaaanggttcccggcaagcccntgggggttgaaaagcttcccaaantanccncctttgggncccntttgctgttcngganngaannaaaaagttgcgggggggttcctcaaaccntggaaaaaaaggctgctgganctggnaggtccccaattngcccaaaagcncaaaggnaaagaaaattnncccaaacccgcccccccccttaacnngggggaaaanngncccaaanggttttnttttgncctttttttanaaaaaaaggttanaaaaagcccccnaacccccaaaaaanaagnttnggnccttnttttttnggggggttttttttttaancccttttggaaccccccttnccntt

SEQ ID NO: 65 - DNA, 914 bp, Homo sapiens
  misc_feature (681)..(681): n is a, c, g, or t
  misc_feature (708)..(708): n is a, c, g, or t
  misc_feature (723)..(723): n is a, c, g, or t
  misc_feature (747)..(747): n is a, c, g, or t
  misc_feature (758)..(758): n is a, c, g, or t
  misc_feature (776)..(776): n is a, c, g, or t
  misc_feature (782)..(782): n is a, c, g, or t
  misc_feature (784)..(784): n is a, c, g, or t
  misc_feature (799)..(799): n is a, c, g, or t
  misc_feature (810)..(810): n is a, c, g, or t
  misc_feature (827)..(827): n is a, c, g, or t
  misc_feature (834)..(834): n is a, c, g, or t
  misc_feature (840)..(841): n is a, c, g, or t
  misc_feature (869)..(869): n is a, c, g, or t
  misc_feature (874)..(874): n is a, c, g, or t
  misc_feature (876)..(876): n is a, c, g, or t
  misc_feature (879)..(880): n is a, c, g, or t
  misc_feature (883)..(883): n is a, c, g, or t
  misc_feature (892)..(892): n is a, c, g, or t
  misc_feature (895)..(897): n is a, c, g, or t
  misc_feature (900)..(900): n is a, c, g, or t
gctcccagcaaaatgggcaaggagaagacccacatcaacatcgtggtcatcggccacgtggactccggaaagtccaccaccacgggccacctcatctacaaatgcggaggtattgacaaaaggaccattgagaagttcgagaaggaggcggctgagatggggaagggatccttcaagtatgcctgggtgctggacaagctgaaggcggagcgtgagcgcggcatcaccatcgacatctccctctggaagttcgagaccaccaagtactacatcaccatcatcgatgcccccggccaccgcgacttcatcaagaacatgatcacgggtacatcccaggcggactgcgcagtgctgatcgtggcggcgggcgtgggcgagttcgaggcgggcatctccaagaatgggcagacgcgggagcatgccctgctggcctacacgctgggtgtgaagcagctcatcgtgggcgtgaacaaaatggactccacagagccggcctacagcgagaagcgctacgacgagatcgtcaaggaagtcagcgcctacatcaagaagatcggctacaacccggccaccgtgccctttgtgcccatctccggctggcacggtgacaacatgctggagccctcccccaacatgccgtggttcaagggctggaaggtggagcgtaaggagggcaacgcnaagcggcgtgtccctgctggaggcccntggaaaccatcctgnccccccacgcgccccacggacaanccccttgcgcntgccgctgcaggacgtgntacaananttggcggcattggcncggtgccccgntgggcccggttggaaanccggcantcctgnnggccggggaatggtggtgaacctttgcncccantnaannttnaaccactgnagnnnaantccttggaaaaagc

SEQ ID NO: 66 - DNA, 815 bp, Homo sapiens
  misc_feature (798)..(798): n is a, c, g, or t
gcccacgcgtccgcccacgcgtccggcgtggggcgcccacaatttgcgcgctctctttctgctgctccccagctctcggatacagccgacaccatgggtttcggagacctgaaaagccctgccggcctccaggtgctcaacgattacctggcggacaagagctacatcgaggggtatgtgccatcacaagcagatgtggcagtatttgaagccgtgtccagcccaccgcctgccgacttgtgtcatgccctacgttggtataatcacatcaagtcttacgaaaaggaaaaggccagcctgccaggagtgaagaaagctttgggcaaatatggtcctgccgatgtggaagacactacaggaagtggagctacagatagtaaagatgatgatgacattgacctctttggatctgatgatgaggaggaaagtgaagaagcaaagaggctaagggaagaacgtcttgcacaatatgaatcaaagaaagccaaaaaacctgcacttgttgccaagtcttccatcttactagatgtgaaaccttgggatgatgagacagatatggcgaaattagaggagtgcgtcagaagcattcaagcagacggcttagtctggggctcatctaaactagttccagtgggatacggaattaagaaacttcaaatacagtgtgtagttgaagatgataaagttggaacagatatgctggaggagcagatcactgcttttgaggactatgtgcagtccatggatgtggctgctttcaacaagatctaaaatccatcctggatcatggcatttaantaaaagattgaaagatt

SEQ ID NO: 67 - DNA, 1184 bp, Homo sapiens
  misc_feature (735)..(735): n is a, c, g, or t
  misc_feature (750)..(750): n is a, c, g, or t
  misc_feature (756)..(756): n is a, c, g, or t
  misc_feature (762)..(762): n is a, c, g, or t
  misc_feature (792)..(792): n is a, c, g, or t
  misc_feature (795)..(795): n is a, c, g, or t
  misc_feature (810)..(810): n is a, c, g, or t
  misc_feature (834)..(834): n is a, c, g, or t
  misc_feature (841)..(841): n is a, c, g, or t
  misc_feature (861)..(861): n is a, c, g, or t
  misc_feature (865)..(865): n is a, c, g, or t
  misc_feature (921)..(921): n is a, c, g, or t
  misc_feature (938)..(938): n is a, c, g, or t
  misc_feature (941)..(941): n is a, c, g, or t
  misc_feature (949)..(949): n is a, c, g, or t
  misc_feature (967)..(967): n is a, c, g, or t
  misc_feature (970)..(970): n is a, c, g, or t
  misc_feature (973)..(973): n is a, c, g, or t
  misc_feature (975)..(975): n is a, c, g, or t
  misc_feature (990)..(990): n is a, c, g, or t
  misc_feature (1000)..(1000): n is a, c, g, or t
  misc_feature (1003)..(1003): n is a, c, g, or t
  misc_feature (1020)..(1020): n is a, c, g, or t
  misc_feature (1027)..(1027): n is a, c, g, or t
  misc_feature (1041)..(1041): n is a, c, g, or t
  misc_feature (1058)..(1058): n is a, c, g, or t
  misc_feature (1061)..(1061): n is a, c, g, or t
  misc_feature (1063)..(1064): n is a, c, g, or t
  misc_feature (1078)..(1079): n is a, c, g, or t
  misc_feature (1085)..(1085): n is a, c, g, or t
  misc_feature (1092)..(1092): n is a, c, g, or t
  misc_feature (1103)..(1103): n is a, c, g, or t
  misc_feature (1105)..(1106): n is a, c, g, or t
  misc_feature (1109)..(1109): n is a, c, g, or t
  misc_feature (1124)..(1124): n is a, c, g, or t
  misc_feature (1130)..(1131): n is a, c, g, or t
  misc_feature (1139)..(1139): n is a, c, g, or t
  misc_feature (1141)..(1141): n is a, c, g, or t
  misc_feature (1149)..(1149): n is a, c, g, or t
  misc_feature (1152)..(1152): n is a, c, g, or t
  misc_feature (1154)..(1154): n is a, c, g, or t
  misc_feature (1172)..(1172): n is a, c, g, or t
  misc_feature (1174)..(1174): n is a, c, g, or t
  misc_feature (1177)..(1179): n is a, c, g, or t
ggaatcaccatggcggctgggaccctgtacacgtatcctgaaaactggagggccttcaaggctctcatcgctgctcagtacagcggggctcaggtccgcgtgctctccgcaccaccccacttccattttggccaaaccaaccgcacccctgaatttctccgcaaatttcctgccggcaaggtcccagcatttgagggtgatgatggattctgtgtgtttgagagcaacgccattgcctactatgtgagcaatgaggagctgcggggaagtactccagaggcagcagcccaggtggtgcagtgggtgagctttgctgattccgatatagtgcccccagccagtacctgggtgttccccaccttgggcatcatgcaccacaacaaacaggccactgagaatgcaaaggaggaagtgaggcgaattctggggctgctggatgcttacttgaagacgaggacttttctggtgggcgaacgagtgacattggctgacatcacagttgtctgcaccctgttgtggctctataagcaggttctagagccttctttccgccaggcctttcccaataccaaccgctggttcctcacctgcattaaccagccccagttccgggctgtcttgggggaagtgaaactgtgtgagaagatggcccagtttgatgctaaaaagtttgcagagacccaacctaaaaaggacacaccacggaaagagaagggttcacgggaagagaagcanaagccccaggctgancggaangagganaaaaaggcggctgcccctgctcctgagganganatggatgaatgtgancaggcgctggctgctgaacccaangccaagnaccccttcgctcactgcccnaaantacctttgtgtggatgaatttaagcgcaagtactccaatgagaaccccctctctgnggcactgccatattttnggnaccctttnaaaaggacggctggtccntgnggnantcaaaaaatcccttncctgaaaaantcnctcaaaactttttgaantgcaatntcatcctggaaagnttcccccactggaaaanctnannaaaaagccttcccnngttctncttttgnaaccaaaaaanannccnttttggaattgggtnttcaanncaaaattncntttccctnaancnaatggggggggaaaaaancnaannngggga

SEQ ID NO: 68 - DNA, 1089 bp, Homo sapiens
  misc_feature (818)..(818): n is a, c, g, or t
  misc_feature (827)..(827): n is a, c, g, or t
  misc_feature (833)..(833): n is a, c, g, or t
  misc_feature (849)..(849): n is a, c, g, or t
  misc_feature (862)..(862): n is a, c, g, or t
  misc_feature (864)..(864): n is a, c, g, or t
  misc_feature (878)..(878): n is a, c, g, or t
  misc_feature (894)..(894): n is a, c, g, or t
  misc_feature (906)..(906): n is a, c, g, or t
  misc_feature (908)..(908): n is a, c, g, or t
  misc_feature (910)..(910): n is a, c, g, or t
  misc_feature (915)..(915): n is a, c, g, or t
  misc_feature (934)..(934): n is a, c, g, or t
  misc_feature (939)..(939): n is a, c, g, or t
  misc_feature (942)..(942): n is a, c, g, or t
  misc_feature (949)..(949): n is a, c, g, or t
  misc_feature (955)..(955): n is a, c, g, or t
  misc_feature (959)..(959): n is a, c, g, or t
  misc_feature (967)..(967): n is a, c, g, or t
  misc_feature (970)..(970): n is a, c, g, or t
  misc_feature (977)..(977): n is a, c, g, or t
  misc_feature (986)..(986): n is a, c, g, or t
  misc_feature (988)..(988): n is a, c, g, or t
  misc_feature (1006)..(1006): n is a, c, g, or t
  misc_feature (1012)..(1013): n is a, c, g, or t
  misc_feature (1022)..(1022): n is a, c, g, or t
  misc_feature (1039)..(1039): n is a, c, g, or t
  misc_feature (1049)..(1052): n is a, c, g, or t
  misc_feature (1056)..(1056): n is a, c, g, or t
  misc_feature (1063)..(1063): n is a, c, g, or t
  misc_feature (1071)..(1071): n is a, c, g, or t
  misc_feature (1077)..(1077): n is a, c, g, or t
  misc_feature (1080)..(1080): n is a, c, g, or t
  misc_feature (1085)..(1085): n is a, c, g, or t
  misc_feature (1088)..(1088): n is a, c, g, or t
gcgccgccatcctcggcgcgactcgcttctttcggttctacctgggagaatccaccgccatccgccaccatggtgaacttcacggtagaccagatccgcgccatcatggacaagaaggccaacatccgcaacatgtctgtcatcgcccacgtggaccatggcaagtccacgctgacagactccctggtgtgcaaggcgggcatcatcgcctcggcccgggccggggagacacgcttcactgatacccggaaggacgagcaggagcgttgcatcaccatcaagtcaactgccatctccctcttctacgagctctcggagaatgacttgaacttcatcaagcagagcaaggacggtgccggcttcctcatcaacctcattgactcccccgggcatgtcgacttctcctcggaggtgactgctgccctccgagtcaccgatggcgcattggtggtggtggactgcgtgtcaggcgtgtgcgtgcagacggagacagtgctgcggcaggccattgccgagcgcatcaagcctgtgctgatgatgaacaagatggaccgcgccctgctggagctgcagctggagcccgaggagctctaccagactttccagcgcatcgtggagaacgtgaacgtcatcatctccacctacggcgagggcgagagcggccccatgggcaacatcatgatcgatcctgtcctcggtaccgtgggctttgggtctggcctccacgggtgggccttcaccctgaagcagtttgccgagatgtatgtggccaagttcgccgccaagggggagggccagttggggcctgccgagcgggnccaagaaangtaaanggacatgatgaaaaanctgtgggggtganangtactttgacccanccaacggcaagttcancaagtcagcccncnanccccnaaaggaaaaaactgccaangcacnttntgccaantgatcntggnaccccatnttnaaggggntttgatgcnantctgaatttcagaaaaangaaaanncaaactganaaaaaaaactggaattnaaattggaannnngggnaaaaganaaaaaggnaacccntgntaaangtnt

SEQ ID NO: 69 - DNA, 915 bp, Homo sapiens
  misc_feature (611)..(611): n is a, c, g, or t
  misc_feature (702)..(702): n is a, c, g, or t
  misc_feature (717)..(717): n is a, c, g, or t
  misc_feature (734)..(734): n is a, c, g, or t
  misc_feature (750)..(751): n is a, c, g, or t
  misc_feature (758)..(759): n is a, c, g, or t
  misc_feature (763)..(763): n is a, c, g, or t
  misc_feature (775)..(775): n is a, c, g, or t
  misc_feature (779)..(779): n is a, c, g, or t
  misc_feature (781)..(781): n is a, c, g, or t
  misc_feature (816)..(816): n is a, c, g, or t
  misc_feature (819)..(819): n is a, c, g, or t
  misc_feature (824)..(825): n is a, c, g, or t
  misc_feature (838)..(838): n is a, c, g, or t
  misc_feature (842)..(842): n is a, c, g, or t
  misc_feature (844)..(844): n is a, c, g, or t
  misc_feature (852)..(852): n is a, c, g, or t
  misc_feature (858)..(858): n is a, c, g, or t
  misc_feature (869)..(869): n is a, c, g, or t
  misc_feature (871)..(871): n is a, c, g, or t
  misc_feature (873)..(873): n is a, c, g, or t
  misc_feature (889)..(889): n is a, c, g, or t
  misc_feature (892)..(893): n is a, c, g, or t
  misc_feature (901)..(901): n is a, c, g, or t
  misc_feature (903)..(904): n is a, c, g, or t
  misc_feature (910)..(910): n is a, c, g, or t
  misc_feature (912)..(912): n is a, c, g, or t
  misc_feature (915)..(915): n is a, c, g, or t
gcccacgcgtccgcccacgcgtccgcccacgcgtccgtgaaggtgttcgtctgctgcgcctccacatcgcactccggggagaagccggtccccactctcccccagttcaccatgggccccaatatgaagatcaacgtgctggaagactttgagggagagaaccctcaggtgcccaagcttgagaagagcatcagcgggaccagccccaaacgggaacacctgcccctggccgtgggcatcgccttcttcctcatgacgttcttggcctcctagctctgccccctcccctggggggggagagatggggcggggcttggaaggagcagggagcctttggcctctccaagggaagcctagtgggcctagacccctcctcccatggctagaagtggggcctgcaccatacatctgtgtccgccccctctaccccttccccccacgtagggcactgtagtggaccaagcacggggacagccatgggtcccgggcggccttgtggctctggtaatgtttggtaccaaacttgggggccaaaaagggcagtgctcaggactccctggcccctggtacctttccctgactcctggtgccctctccctttgtccccccanagagacatatgcccccagagagagcaaatcgaagcgtgggaggcacccccattgctctcctccaggggcagaacatggggagggggactanatgggcaaggggcancactgcctgctgcttcnttcccctgtttacagnnaataaannagtnctcctcccccantccnanttccaggattggggtttggattgaaaccaatttanaantaaanncccctgggggggngggnantggaaaangatggnaaggggtgggnantnggggtgccaggaaggnatnnaaaaaatntnntatttntnttn

SEQ ID NO: 70 - DNA, 1159 bp, Homo sapiens
  misc_feature (661)..(661): n is a, c, g, or t
  misc_feature (762)..(762): n is a, c, g, or t
  misc_feature (779)..(779): n is a, c, g, or t
  misc_feature (799)..(799): n is a, c, g, or t
  misc_feature (809)..(809): n is a, c, g, or t
  misc_feature (828)..(828): n is a, c, g, or t
  misc_feature (845)..(845): n is a, c, g, or t
  misc_feature (861)..(861): n is a, c, g, or t
  misc_feature (863)..(863): n is a, c, g, or t
  misc_feature (884)..(884): n is a, c, g, or t
  misc_feature (898)..(898): n is a, c, g, or t
  misc_feature (912)..(912): n is a, c, g, or t
  misc_feature (915)..(915): n is a, c, g, or t
  misc_feature (929)..(929): n is a, c, g, or t
  misc_feature (934)..(934): n is a, c, g, or t
  misc_feature (943)..(943): n is a, c, g, or t
  misc_feature (945)..(945): n is a, c, g, or t
  misc_feature (949)..(949): n is a, c, g, or t
  misc_feature (952)..(952): n is a, c, g, or t
  misc_feature (960)..(960): n is a, c, g, or t
  misc_feature (962)..(962): n is a, c, g, or t
  misc_feature (965)..(965): n is a, c, g, or t
  misc_feature (976)..(976): n is a, c, g, or t
  misc_feature (990)..(990): n is a, c, g, or t
  misc_feature (995)..(995): n is a, c, g, or t
  misc_feature (1006)..(1006): n is a, c, g, or t
  misc_feature (1022)..(1022): n is a, c, g, or t
  misc_feature (1024)..(1024): n is a, c, g, or t
  misc_feature (1038)..(1038): n is a, c, g, or t
  misc_feature (1056)..(1056): n is a, c, g, or t
  misc_feature (1059)..(1059): n is a, c, g, or t
  misc_feature (1064)..(1064): n is a, c, g, or t
  misc_feature (1074)..(1075): n is a, c, g, or t
  misc_feature (1077)..(1077): n is a, c, g, or t
  misc_feature (1093)..(1093): n is a, c, g, or t
  misc_feature (1104)..(1104): n is a, c, g, or t
  misc_feature (1110)..(1110): n is a, c, g, or t
  misc_feature (1120)..(1120): n is a, c, g, or t
  misc_feature (1124)..(1124): n is a, c, g, or t
  misc_feature (1129)..(1129): n is a, c, g, or t
  misc_feature (1134)..(1134): n is a, c, g, or t
  misc_feature (1138)..(1138): n is a, c, g, or t
  misc_feature (1148)..(1148): n is a, c, g, or t
  misc_feature (1150)..(1150): n is a, c, g, or t
  misc_feature (1152)..(1152): n is a, c, g, or t
  misc_feature (1155)..(1155): n is a, c, g, or t
gttcctgcctctgccagaacggagggacctgtgaccctgtctcaggccactgtgcgtgcccagagggctgggccggcctggcctgtgagaaggagtgcctcccccgggacgtcagagctggctgccggcacagcggcggttgcctcaacgggggcctgtgtgacccgcacacgggccgctgcctctgcccagccggctggactggggacaagtgtcagagcccctgcctgcggggctggtttggagaggcctgtgcccagcgctgcagctgcccgcctggcgctgcctgccaccacgtcactggggcctgccgctgtccccctggcttcactggctccggctgcgagcagggatgtccgcccgggcggtatgggccaggctgtgaacagctgtgtgggtgtctcaacgggggctcctgtgatgcggccacgggggcctgccgctgccccactgggttcctcgggacggactgcaacctcacctgtccgcagggccgcttcggccccaactgcacccacgtgtgtgggtgtgggcagggggcggcctgcgaccctgtgaccggcacctgcctctgccccccggggagagccggcgtccgctgtgagcgaggctgcccccagaaccggtttggcgtgggctgcgagcacacctgctcctgcanaaatgggggcctgtgccacgccagcaacggcagctgctcctgtggcctgggctggacggggcggcactgcgagctggcctgtccccctgggcgctacgganccgcctgcaatctggantgctcctgccacaacaacancacgtgtgancctgcaacgggcacctgcngctgcggccccggcttntatggcaaggcctgcnancaccctgtcccctggcttcanggggctgctgccanggttttgctgttgnaanatgaaccccctgcnacccnataatggcnangctntgncctgcggntncanggcaatttggnaaaagggttgaacnagttnatttgaaaagnttccccaaccctttantntaaaggggggcacntggaacctttaacggttnttnctttnccccaagggnntnaaaaaccttttaactntaattaaaaanggccantttggccccnttcnccccnatttnaatncggggggggntnanatnaacc

SEQ ID NO: 71 - DNA, 1042 bp, Homo sapiens
  misc_feature (237)..(237): n is a, c, g, or t
  misc_feature (283)..(283): n is a, c, g, or t
  misc_feature (313)..(313): n is a, c, g, or t
  misc_feature (768)..(768): n is a, c, g, or t
  misc_feature (771)..(771): n is a, c, g, or t
  misc_feature (776)..(776): n is a, c, g, or t
  misc_feature (781)..(781): n is a, c, g, or t
  misc_feature (830)..(830): n is a, c, g, or t
  misc_feature (836)..(836): n is a, c, g, or t
  misc_feature (839)..(839): n is a, c, g, or t
  misc_feature (843)..(843): n is a, c, g, or t
  misc_feature (847)..(847): n is a, c, g, or t
  misc_feature (876)..(876): n is a, c, g, or t
  misc_feature (883)..(883): n is a, c, g, or t
  misc_feature (886)..(886): n is a, c, g, or t
  misc_feature (915)..(917): n is a, c, g, or t
  misc_feature (919)..(919): n is a, c, g, or t
  misc_feature (924)..(924): n is a, c, g, or t
  misc_feature (926)..(926): n is a, c, g, or t
  misc_feature (929)..(929): n is a, c, g, or t
  misc_feature (938)..(938): n is a, c, g, or t
  misc_feature (947)..(947): n is a, c, g, or t
  misc_feature (973)..(973): n is a, c, g, or t
  misc_feature (977)..(977): n is a, c, g, or t
  misc_feature (982)..(982): n is a, c, g, or t
  misc_feature (1001)..(1001): n is a, c, g, or t
  misc_feature (1003)..(1003): n is a, c, g, or t
  misc_feature (1006)..(1006): n is a, c, g, or t
  misc_feature (1009)..(1010): n is a, c, g, or t
  misc_feature (1013)..(1013): n is a, c, g, or t
  misc_feature (1017)..(1017): n is a, c, g, or t
  misc_feature (1030)..(1032): n is a, c, g, or t
gcgagccaggattcccgatccagagacaatggccccgatgggatggagcccgaaggcgtcatcgagagtaactggaatgagattgttgacagctttgatgacatgaacctctcggagtcccttctccgtggcatctacgcctatggttttgagaagccctctgccatccagcagcgagccattctaccttgtatcaagggttatgatgtgattgctcaagcccaatctgggactggnaaaacggccacatttgccatatcgattctgcagcagattgaattanatctaaaagccacccaggccttggtcctancacccactcgagaattggctcagcagatacagaaggtggtcatggcactaggagactacatgggcgcctcctgtcacgcctgtatcgggggcaccaacgtgcgtgctgaggtgcagaaactgcagatggaagctccccacatcatcgtgggtacccctggccgtgtgtttgatatgcttaaccggagatacctgtcccccaaatacatcaagatgtttgtactggatgaagctgacgaaatgttaagccgtggattcaaggaccagatctatgacatattccaaaagctcaacagcaacacccaggtagttttgctgtcagccacaatgccttctgatgtgcttgaggtgaccaagaaattcatgagggaccccattcggattcttgtcaagaaagaaaagttgaccctggaggggtatccgccagttctacatcaacgtggaaacgaaaagaantgnaaacntgganacacctatgtgaacttgtatgaaacccctgaccattcacccaagcagtnatcttnctnaaancccnggaaggaaaggtgggacttggctccaccnaaaaaangcntggctcgaaattttccctggtatcccccnnngncttgnanaantttggaccnaaaaggaancgaaaacgtgattataaggaatttcnttcnggccnctaaaaaaatttttattancnctnaanntgntggncaaaaaaattttnnngaaaccaggt

SEQ ID NO: 72 - DNA, 845 bp, Homo sapiens
gccatccgggatgctaacctgtacgtcagcgggctccccaagaccatgagccagaaagagatggagcagctcttctcccagtacggccgcatcatcacgtcccgcatcctggtggaccaggtcacaggtgtctctcggggtgtgggattcatccgctttgacaagaggattgaggccgaagaggctatcaaaggactgaatgggcagaagccgctgggcgcagctgagcccatcacagtcaagttcgcgaacaacccaagtcagaagacggggcaggcgctgctcacccacctctaccagtcatccgcccggcgctacgcaggccccctacaccatcagacccagcgtttccggctggacaatttgctcaacatggcctacggcgtcaagaggttctcgccgatcgccatcgatggtatgagcggcctggcgggcgtgggcctgtcggggggcgcggcgggcgccggctggtgcatcttcgtgtacaacctgtcaccggaggcagacgagagcgtgctgtggcagctgttcgggccttttggggcagtcaccaacgtcaaggtcatccgtgatttcaccaccaacaagtgcaagggtttcggcttcgtgaccatgaccaactatgacgaggcggccatggccatcgccagcctgaacggctatcgcctggggcgagcgcgtgctgcaggtctccttcaagaccagcaaacagcacaaggcgtgagcccaccccgcctgccctcccaccccctccccgggcagcagagagagagagagagaaagagagagagagagagagaaggggcccaagagagacagcacaggcagccccacggacgacgcga

SEQ ID NO: 73 - DNA, 1040 bp, Homo sapiens
  misc_feature (611)..(611): n is a, c, g, or t
  misc_feature (696)..(696): n is a, c, g, or t
  misc_feature (713)..(713): n is a, c, g, or t
  misc_feature (722)..(722): n is a, c, g, or t
  misc_feature (726)..(726): n is a, c, g, or t
  misc_feature (734)..(735): n is a, c, g, or t
  misc_feature (757)..(757): n is a, c, g, or t
  misc_feature (765)..(765): n is a, c, g, or t
  misc_feature (788)..(788): n is a, c, g, or t
  misc_feature (798)..(798): n is a, c, g, or t
  misc_feature (802)..(802): n is a, c, g, or t
  misc_feature (812)..(812): n is a, c, g, or t
  misc_feature (819)..(819): n is a, c, g, or t
  misc_feature (830)..(830): n is a, c, g, or t
  misc_feature (833)..(833): n is a, c, g, or t
  misc_feature (855)..(855): n is a, c, g, or t
  misc_feature (867)..(867): n is a, c, g, or t
  misc_feature (869)..(869): n is a, c, g, or t
  misc_feature (872)..(872): n is a, c, g, or t
  misc_feature (881)..(881): n is a, c, g, or t
  misc_feature (889)..(889): n is a, c, g, or t
  misc_feature (891)..(891): n is a, c, g, or t
  misc_feature (899)..(899): n is a, c, g, or t
  misc_feature (910)..(910): n is a, c, g, or t
  misc_feature (916)..(916): n is a, c, g, or t
  misc_feature (922)..(922): n is a, c, g, or t
  misc_feature (927)..(928): n is a, c, g, or t
  misc_feature (937)..(938): n is a, c, g, or t
  misc_feature (947)..(947): n is a, c, g, or t
  misc_feature (950)..(953): n is a, c, g, or t
  misc_feature (966)..(966): n is a, c, g, or t
  misc_feature (978)..(978): n is a, c, g, or t
  misc_feature (987)..(987): n is a, c, g, or t
  misc_feature (993)..(993): n is a, c, g, or t
  misc_feature (1005)..(1005): n is a, c, g, or t
  misc_feature (1007)..(1007): n is a, c, g, or t
  misc_feature (1012)..(1012): n is a, c, g, or t
  misc_feature (1017)..(1017): n is a, c, g, or t
  misc_feature (1036)..(1037): n is a, c, g, or t
  misc_feature (1039)..(1039): n is a, c, g, or t
ggggacaatgataagactcgctatatggggaagggtgtctcaaaggctgttgagcacatcaataaaactattgcgcctgccctggttagcaagaaactgaacgtcacagaacaagagaagattgacaaactgatgatcgagatggatggaacagaaaataaatctaagtttggtgcgaacgccattctgggggtgtcccttgccgtctgcaaagctggtgccgttgagaagggggtccccctgtaccgccacatcgctgacttggctggcaactctgaagtcatcctgccagtcccggcgttcaatgtcatcaatggcggttctcatgctggcaacaagctggccatgcaggagttcatgatcctcccagtcggtgcagcaaacttcagggaagccatgcgcattggagcagaggtttaccacaacctgaagaatgtcatcaaggagaaatatgggaaagatgccaccaatgtgggggatgaaggcgggtttgctcccaacatcctggagaataaagaaggcctggagctgctgaagactgctattgggaaagctggctacactgataaggtggtcatcggcatggacgtagcggcctccgagttcttcangtctggggaagtatgacctggacttcaagtctcccgatgaccccagccaggtacatctccccctgaccagctggctgaactgtanaagtccttcatcaaagnactacccantggngtcctatnnaaaaatccctttgaccaagatnactggggnaactttggcaaaaaatttcccanccaggggcangaantccaggtaantgggggnatgatctcccnagngaacccaaccccaaaaaaggancccccaaggccngnaancaaaaaatncttggaantnccccctgntccaaattcanccaaanttggcnccccnngacccaaanncccttcaanggnnnnaaacttggcccanaaccaaaggttngggcccccnggggtntccccccccttncnggggnaaaanaaaaaaaacctcctccccnnanc

SEQ ID NO: 74 - DNA, 691 bp, Homo sapiens
gagcagcgcaggttgtccccgtttcccctcccccttcccttctccggttgccttcccgggccccttacactccacagtcccggtcccgccatgtcccagaaacaagaagaagagaaccctgcggaggagaccggcgaggagaagcaggacacgcaggagaaagaaggtattctgcctgagagagctgaagaggcaaagctaaaggccaaatacccaagcctaggacaaaagcctggaggctccgacttcctcatgaagagactccagaaagggcaaaagtactttgactcaggagactacaacatggccaaagccaagatgaagaataagcagctgccaagtgcaggaccagacaagaacctggtgactggtgatcacatccccaccccacaggatctgccccagagaaagtcctcgctcgtcaccagcaagcttgcgggtggccaagttgaatgatgctgcccggggctctgccagatcctgagacgcttcccctccctgccccacccgggtcctgtgctggctcctgccccttcctgcttttgcagccaggggtcaggaggtggctcgggtgtgggctggagaggcagaagccctttcctgttggtgtcccagcacatggagccccttgggctgagcaccaagaccttgaaccttttttgttttaccttttttccaaataacagttggg

SEQ ID NO: 75 - DNA, 363 bp, Homo sapiens
gagaaagcagagcagtatcaacccctcacagcctcagtcagcctccagaactccctagatgcccccatggaggactgtgtgatctccatcctgggaagggggctcattcacagagagaggagctacagattccgttcagtgtggcctgaaaacaccatgtgtgccaagttccagttcacgccaacacatgtggggctccagagactcactgtggaagtggactgcaacatgttccagaacctaaccaactataaaagcgtcaccgtggtagcccctgaactatcagcttaaacttccagctctatcaccactctcctgccaacccttgttctacaatctaaaccaaacatgtgctaggaagag

SEQ ID NO: 76 - DNA, 1014 bp, Homo sapiens
  misc_feature (708)..(708): n is a, c, g, or t
  misc_feature (746)..(746): n is a, c, g, or t
  misc_feature (770)..(770): n is a, c, g, or t
  misc_feature (786)..(786): n is a, c, g, or t
  misc_feature (816)..(816): n is a, c, g, or t
  misc_feature (821)..(821): n is a, c, g, or t
  misc_feature (845)..(845): n is a, c, g, or t
  misc_feature (853)..(853): n is a, c, g, or t
  misc_feature (870)..(871): n is a, c, g, or t
  misc_feature (874)..(874): n is a, c, g, or t
  misc_feature (880)..(880): n is a, c, g, or t
  misc_feature (886)..(886): n is a, c, g, or t
  misc_feature (888)..(888): n is a, c, g, or t
  misc_feature (909)..(909): n is a, c, g, or t
  misc_feature (918)..(919): n is a, c, g, or t
  misc_feature (932)..(932): n is a, c, g, or t
  misc_feature (942)..(942): n is a, c, g, or t
  misc_feature (946)..(946): n is a, c, g, or t
  misc_feature (950)..(950): n is a, c, g, or t
  misc_feature (956)..(956): n is a, c, g, or t
  misc_feature (962)..(963): n is a, c, g, or t
  misc_feature (965)..(965): n is a, c, g, or t
  misc_feature (977)..(977): n is a, c, g, or t
  misc_feature (983)..(983): n is a, c, g, or t
  misc_feature (988)..(988): n is a, c, g, or t
  misc_feature (993)..(993): n is a, c, g, or t
  misc_feature (996)..(997): n is a, c, g, or t
  misc_feature (1002)..(1002): n is a, c, g, or t
  misc_feature (1004)..(1004): n is a, c, g, or t
  misc_feature (1011)..(1011): n is a, c, g, or t
  misc_feature (1014)..(1014): n is a, c, g, or t
ggcagaagacgaatcccactccttcaccctgaccagcgagaccaacactgccaccgtgacacagctgagccctggccacatctatggtttccaggtgcgggcccggactgctgccggccacggcccctacgggggcaaagtctatttccagacacttcctcaaggggagctgtcttcccagcttccggaaagactctccttggtgatcggctccatcctgggggctttggccttcctcctgctggcagccatcaccgtgctggcggtcgtcttccagcggaagcggcgtgggactggctacacggagcagctgcagcaatacagcagcccaggactcggggtgaagtattacatcgacccctccacctacgaggacccctgtcaggccatccgagaacttgcccgggaagtcgatcctgcttatatcaagattgaggaggtcattgggacaggctcttttggagaagtgcgccagggccgcctgcagccacggggacggagggagcagactgtggccatccaggccctgtgggccgggggcgccgaaagcctgcagatgaccttcctgggccgggccgcagtgctgggtcagttccagcaccccaacatcctgcggctggagggcgtggtcaccaagagccgacccctcatggtgctgacggagttcatggagcttggccccctggacagcttcctcaggcagcgggnagggccagttcagcagcctgcagctggtggccatgcancggggagtggctgctgccatgcantaactgtccagctttngccttcgtccatcgctcgctgtctgcccanagcgngcttgtgaaaaacccacttggttntgcaaggnggcccgtttttggccannatncctcanggcccnantttgtttgcttccctgggcanccccaaagnncattgcacatggnaaagcataanaccntccnatgaanttctgnnancttttgggaaanctcctntgggnaaagnaannaattntngaaaaanggn

SEQ ID NO: 77 - DNA, 973 bp, Homo sapiens
  misc_feature (768)..(768): n is a, c, g, or t
  misc_feature (777)..(777): n is a, c, g, or t
  misc_feature (819)..(819): n is a, c, g, or t
  misc_feature (850)..(850): n is a, c, g, or t
  misc_feature (853)..(853): n is a, c, g, or t
  misc_feature (855)..(855): n is a, c, g, or t
  misc_feature (859)..(860): n is a, c, g, or t
  misc_feature (866)..(866): n is a, c, g, or t
  misc_feature (878)..(878): n is a, c, g, or t
  misc_feature (884)..(884): n is a, c, g, or t
  misc_feature (910)..(910): n is a, c, g, or t
  misc_feature (918)..(918): n is a, c, g, or t
  misc_feature (928)..(928): n is a, c, g, or t
  misc_feature (939)..(939): n is a, c, g, or t
  misc_feature (955)..(955): n is a, c, g, or t
  misc_feature (960)..(961): n is a, c, g, or t
  misc_feature (966)..(969): n is a, c, g, or t
  misc_feature (973)..(973): n is a, c, g, or t
gcagagccttcccactgtggacacctcggcccaggcggcccctcagacctacgccgaatatgccatctcacagcctctggaaggggctggggccacgtgccccacagggtcagagcccctggcaggagagacgcccaaccaggccctgaaacccggggcaaaatccaacagcatcattgtgagccctcggcagaggggcaatcccgtactgaagttcgtgcgcaacgtgccctgggaatttggcgacgtaattcccgactatgtgctgggccagagcacctgtgccctgttcctcagcctccgctaccacaacctgcacccagactacatccatgggcggctgcagagcctggggaagaacttcgccttgcgggtcctgcttgtccaggtggatgtgaaagatccccagcaggccctcaaggagctggctaagatgtgtatcctggccgactgcacattgatcctcgcctggagccccgaggaagctgggcggtacctggagacctacaaggcctatgagcagaaaccagcggacctcctgatggagaagctagagcaggacttcgtctcccggtctctggaacagctcatcgccgcatcaagagaagatctggccttatgcccaggcctgggccctcagaaagcccggaggctgtttgatgtcctgcacgagcccttcttgaaagtaccctgatgaccccagctgccaaggaaacccccagtgtaataataaatcgtcctcccaggccagggctcctgctggctgcnctggtgcantctctgggggaggggattctgggggtgtcaccttctggtggncccaggtggggcaccttcagcttttctttanttncntcanntttccnggggggcaaaantaaaanagggctggctgctggctgctttcttnccgctttnttgtcccggncttgtgggaancctcctcccccaaaanttttnnaattnnnntggn

SEQ ID NO: 78 - DNA, 360 bp, Homo sapiens
  misc_feature (283)..(283): n is a, c, g, or t
  misc_feature (289)..(289): n is a, c, g, or t
  misc_feature (323)..(323): n is a, c, g, or t
  misc_feature (331)..(331): n is a, c, g, or t
  misc_feature (336)..(336): n is a, c, g, or t
  misc_feature (338)..(338): n is a, c, g, or t
  misc_feature (341)..(345): n is a, c, g, or t
  misc_feature (348)..(349): n is a, c, g, or t
  misc_feature (351)..(352): n is a, c, g, or t
  misc_feature (356)..(359): n is a, c, g, or t
ggggatcaattggaaaacgaggattccagcgtgcacatttccccccggcagaagcgagatgccaactccagcatctacaaaggcaagaagtgccgcatggagtcctgcttcgatttcaccctttgcaagaaaaacggcttcaaagtctacgtatacccacagcaaaaaggggagaaaatcgccgaaagttaccaaaacattctagcggccatcgagggctccaggttctacacctcggaccccagccaggcgtgcctctttgtcctgagtctggatactttanacaganaccagttgtcacctcaaattgtgcacatactgangtgacaanaggtntntgnnnnnagnntnnagannnng

SEQ ID NO: 79 - DNA, 1051 bp, Homo sapiens
  misc_feature (764)..(764): n is a, c, g, or t
  misc_feature (788)..(788): n is a, c, g, or t
  misc_feature (823)..(823): n is a, c, g, or t
  misc_feature (841)..(841): n is a, c, g, or t
  misc_feature (856)..(856): n is a, c, g, or t
  misc_feature (861)..(861): n is a, c, g, or t
  misc_feature (879)..(879): n is a, c, g, or t
  misc_feature (906)..(906): n is a, c, g, or t
  misc_feature (911)..(911): n is a, c, g, or t
  misc_feature (921)..(921): n is a, c, g, or t
  misc_feature (940)..(940): n is a, c, g, or t
  misc_feature (960)..(961): n is a, c, g, or t
  misc_feature (966)..(966): n is a, c, g, or t
  misc_feature (970)..(970): n is a, c, g, or t
  misc_feature (978)..(978): n is a, c, g, or t
  misc_feature (983)..(983): n is a, c, g, or t
  misc_feature (987)..(987): n is a, c, g, or t
  misc_feature (989)..(989): n is a, c, g, or t
  misc_feature (991)..(992): n is a, c, g, or t
  misc_feature (1004)..(1004): n is a, c, g, or t
  misc_feature (1013)..(1014): n is a, c, g, or t
  misc_feature (1016)..(1016): n is a, c, g, or t
  misc_feature (1025)..(1025): n is a, c, g, or t
  misc_feature (1032)..(1032): n is a, c, g, or t
  misc_feature (1040)..(1040): n is a, c, g, or t
  misc_feature (1047)..(1047): n is a, c, g, or t
  misc_feature (1049)..(1050): n is a, c, g, or t
gcagccttccaggaacccccacccaagcccagccgacctaagtacagaccccctccgcaaaccaacctcctggctccaaagctgcagttccaggaggaggacttcatccaacccagcagccgagaagaggcccagcagctgtgggaggctgaaaaggtcaaaatgcggcaaatcctggacaaacagcagaagcagatggtggaggactaccagtggctcaggcaggaggagaagtccctggaccccatggtttatatgaatgataagtccccattgacgccagagaaggaggtcggctacctggagttcacagggcccccacagaagcccccgaggctgggcgcacagtccatccagcccacagctaacctggaccggaccgatgacctggtgtacctcaatgtcatggagctggtgcgggccgtgctggagctcaagaatgagctctgtcagctgccccccgagggctacgtggtggtggtgaagaatgtggggctgaccctgcggaagctcatcgggagcgtggatgatctcctgccttccttgccgtcatcttcacggacagagatcgagggcacccagaaactgctcaacaaagacctggcagagctcatcaacaagatgcggctggcgcagcagaacgccgtgacctccctgagtgaggagtgcaagaggcagatgctgacggcttcacacaccctggctgtggacgccaagaacctgctcgacgctgtggaccaggccaaggttctggccaatctggnccacccacctgcaaagtgacgganggtgggggccacctgcctgcgtcttccgcccctgnctgccatgtacctccccntgccttgctgttggncatgngggtcttccagggaaaangccaaggggagtcaccttcccttgcantttgnagaagccttntccccacccttaccctggnttgtactgctcaggctgcanntgganaaanggaatctnggctntggnancnngggtgacggganaaaaatggnntnaaagggganttttgtngctggccnttttctnannc

SEQ ID NO: 80 - DNA, 1068 bp, Homo sapiens
  misc_feature (713)..(713): n is a, c, g, or t
  misc_feature (756)..(756): n is a, c, g, or t
  misc_feature (773)..(773): n is a, c, g, or t
  misc_feature (810)..(810): n is a, c, g, or t
  misc_feature (845)..(845): n is a, c, g, or t
  misc_feature (847)..(847): n is a, c, g, or t
  misc_feature (850)..(850): n is a, c, g, or t
  misc_feature (864)..(864): n is a, c, g, or t
  misc_feature (872)..(872): n is a, c, g, or t
  misc_feature (879)..(879): n is a, c, g, or t
  misc_feature (897)..(897): n is a, c, g, or t
  misc_feature (899)..(899): n is a, c, g, or t
  misc_feature (902)..(902): n is a, c, g, or t
  misc_feature (936)..(936): n is a, c, g, or t
  misc_feature (945)..(945): n is a, c, g, or t
  misc_feature (948)..(948): n is a, c, g, or t
  misc_feature (956)..(956): n is a, c, g, or t
  misc_feature (958)..(958): n is a, c, g, or t
  misc_feature (965)..(965): n is a, c, g, or t
  misc_feature (978)..(978): n is a, c, g, or t
  misc_feature (981)..(981): n is a, c, g, or t
  misc_feature (985)..(985): n is a, c, g, or t
  misc_feature (988)..(988): n is a, c, g, or t
  misc_feature (992)..(992): n is a, c, g, or t
  misc_feature (998)..(998): n is a, c, g, or t
  misc_feature (1003)..(1003): n is a, c, g, or t
  misc_feature (1011)..(1012): n is a, c, g, or t
  misc_feature (1020)..(1020): n is a, c, g, or t
  misc_feature (1029)..(1029): n is a, c, g, or t
  misc_feature (1033)..(1033): n is a, c, g, or t
  misc_feature (1035)..(1035): n is a, c, g, or t
  misc_feature (1037)..(1037): n is a, c, g, or t
  misc_feature (1043)..(1044): n is a, c, g, or t
  misc_feature (1046)..(1046): n is a, c, g, or t
  misc_feature (1048)..(1050): n is a, c, g, or t
  misc_feature (1059)..(1059): n is a, c, g, or t
  misc_feature (1064)..(1064): n is a, c, g, or t
gggcaactcacgctccggaaactgcaggagctgtcctcaaaggcggatgaggccagcgagctggcatgccccacgcccaaggaggatggtctggcccagcagcagactcagctgaacctgcgctccctgctggtgaacccggagggccccaccctgatgcggctcaactccgtgcagagctcggagcggcccctgttcctggtgcacccaatcgagggctccaccaccgtgttccacagcctggcctcccggctcagcatccccacctatggcctgcagtgcacccgagctgcgccccttgacagcatccacagcctggctgcctactacatcgactgcatcaggcaggtgcagcccgagggcccctaccgcgtggccggctactcctacggggcctgcgtggcctttgaaatgtgctcccagctgcaggcccagcagagcccagcccccacccacaacagcctcttcctgttcgacggctcgcccacctacgtactggcctacacccagagctaccgggcaaagctgaccccaggctgtgaggctgaggctgagacggaggccatatgcttcttcgtgcagcagttcacggacatggagcacaacagggtgctggaggcgctgctgccgctgaagggcctagaggagcgtgtggcagccgccgtggacctgatcatcaagagccaccagggcctggaccgccaggagctganctttgcggcccggtccttctactacaagctgcgtgccgctgancagtacacacccaaagncaagtaccatggcaacgtgatgctactgcgcgccaanacgggtggcgcctacggcgaagaacctgggcgcgnantanaaccttttccaagntatgcaangggaaantatccgtccacgtcatcnanggngacaccgcacgctgctgaaggcaacggcttgaantcatatcanatnatccaaantncctggtnaaccaccttaacntgngganggntagncccttnccccncctgcccnnagtaattnaaattccanccancnancaaccnngnannnaagggaatnaaggnctgc

SEQ ID NO: 81 - DNA, 484 bp, Homo sapiens
  misc_feature (482)..(482): n is a, c, g, or t
  misc_feature (484)..(484): n is a, c, g, or t
ggctgggaccgccgttcagtcgccaatatgcagctctttgtccgcgcccaggagctacacaccttcgaggtgaccggccaggaaacggtcgcccagatcaaggctcatgtagcctcactggagggcattgccccggaagatcaagtcgtgctcctggcaggcgcgcccctggaggatgaggccactctgggccagtgcggggtggaggccctgactaccctggaagtagcaggccgcatgcttggaggtaaagtccatggttccctggcccgtgctggaaaagtgagaggtcagactcctaaggtggccaaacaggagaagaagaagaagaagacaggtcgggctaagcggcggatgcagtacaaccggcgctttgtcaacgttgtgcccacctttggcaagaagaagggccccaatgccaactcttaagtcttttgtaattctggctttctctaataaaaaagccacttagttcagtcaanan

SEQ ID NO: 82 - DNA, 1247 bp, Homo sapiens
  misc_feature (763)..(763): n is a, c, g, or t
  misc_feature (784)..(784): n is a, c, g, or t
  misc_feature (820)..(820): n is a, c, g, or t
  misc_feature (857)..(857): n is a, c, g, or t
  misc_feature (872)..(872): n is a, c, g, or t
  misc_feature (893)..(893): n is a, c, g, or t
  misc_feature (902)..(902): n is a, c, g, or t
  misc_feature (920)..(920): n is a, c, g, or t
  misc_feature (923)..(923): n is a, c, g, or t
  misc_feature (932)..(932): n is a, c, g, or t
  misc_feature (937)..(937): n is a, c, g, or t
  misc_feature (951)..(951): n is a, c, g, or t
  misc_feature (981)..(981): n is a, c, g, or t
  misc_feature (994)..(994): n is a, c, g, or t
  misc_feature (1005)..(1005): n is a, c, g, or t
  misc_feature (1008)..(1008): n is a, c, g, or t
  misc_feature (1017)..(1017): n is a, c, g, or t
  misc_feature (1031)..(1031): n is a, c, g, or t
  misc_feature (1036)..(1039): n is a, c, g, or t
  misc_feature (1051)..(1051): n is a, c, g, or t
  misc_feature (1054)..(1054): n is a, c, g, or t
  misc_feature (1057)..(1057): n is a, c, g, or t
  misc_feature (1062)..(1062): n is a, c, g, or t
  misc_feature (1076)..(1076): n is a, c, g, or t
  misc_feature (1079)..(1079): n is a, c, g, or t
  misc_feature (1081)..(1081): n is a, c, g, or t
  misc_feature (1102)..(1102): n is a, c, g, or t
  misc_feature (1107)..(1107): n is a, c, g, or t
  misc_feature (1125)..(1125): n is a, c, g, or t
  misc_feature (1127)..(1127): n is a, c, g, or t
  misc_feature (1136)..(1136): n is a, c, g, or t
  misc_feature (1138)..(1138): n is a, c, g, or t
  misc_feature (1149)..(1149): n is a, c, g, or t
  misc_feature (1154)..(1154): n is a, c, g, or t
  misc_feature (1158)..(1159): n is a, c, g, or t
  misc_feature (1163)..(1163): n is a, c, g, or t
  misc_feature (1172)..(1172): n is a, c, g, or t
  misc_feature (1178)..(1178): n is a, c, g, or t
  misc_feature (1188)..(1188): n is a, c, g, or t
  misc_feature (1190)..(1190): n is a, c, g, or t
  misc_feature (1195)..(1195): n is a, c, g, or t
  misc_feature (1197)..(1197): n is a, c, g, or t
  misc_feature (1199)..(1199): n is a, c, g, or t
  misc_feature (1203)..(1203): n is a, c, g, or t
  misc_feature (1225)..(1225): n is a, c, g, or t
  misc_feature (1229)..(1229): n is a, c, g, or t
  misc_feature (1231)..(1231): n is a, c, g, or t
  misc_feature (1244)..(1244): n is a, c, g, or t
ggtcgcgcccgggagtccgccgcctgcgccaggatggagttcgtgaaatgccttggccaccccgaagagttctacaacctggtgcgcttccggatcgggggcaagcggaaggtgatgcccaagatggaccaggactcgctcagcagcagcctgaaaacttgctacaagtatctcaatcagaccagtcgcagtttcgcagctgttatccaggcgctggatggggaaatgcgcaacgcagtgtgcatattttatctggttctccgagctctggacacactggaagatgacatgaccatcagtgtggaaaagaaggtcccgctgttacacaactttcactctttcctttaccaaccagactggcggttcatggagagcaaggagaaggatcgccaggtgctggaggacttcccaacgatctcccttgagtttagaaatctggctgagaaataccaaacagtgattgccgacatttgccggagaatgggcattgggatggcagagtttttggataagcatgtgacctctgaacaggagtgggacaagtactgccactatgttgctgggctggtcggaattggcctttcccgtcttttctcagcctcagagtttgaagaccccttagttggtgaagatacagaacgtgccaactctatgggcctgtttctgcagaaaacaaacatcatccgtgactatctggaagaccagcaaggaggaagagagttctggcctcaagaggtttggagcaggtatgttaagaagttangggaattttgctaagccgganaatattgacttggccgtgcagtgcctgaatgaactnataaccaatgcactgcaccacatcccaaatgtcatcncctacctttcgaaantcaaaaaccaaaagggggttnaacttctgngctattccccaagggganggncaattgccnctttnggcctgcctgttanaaaaaccaccaggggttccaaggggcaatnaaaattccgaaangggcaaacagngancctgaaaanggatgcccccaaantcccnnnntttccaaacccntcnttnttccntttttggaaaaaanttntnaaaaatccccgaaccaaaccnttttntaaaaaaaaaaggaaaananttccccccncngaaaccaaaanttccnattnntaangattttccnaaaccnaaaacccccnanaacgngngnttgnaagttttggggcccggaagggnaaantnaccctctccccgnaaa

SEQ ID NO: 83 - DNA, 1058 bp, Homo sapiens
  misc_feature (869)..(869): n is a, c, g, or t
  misc_feature (876)..(876): n is a, c, g, or t
  misc_feature (889)..(889): n is a, c, g, or t
  misc_feature (896)..(897): n is a, c, g, or t
  misc_feature (907)..(907): n is a, c, g, or t
  misc_feature (961)..(961): n is a, c, g, or t
  misc_feature (975)..(975): n is a, c, g, or t
  misc_feature (991)..(991): n is a, c, g, or t
  misc_feature (996)..(996): n is a, c, g, or t
  misc_feature (998)..(998): n is a, c, g, or t
  misc_feature (1004)..(1004): n is a, c, g, or t
  misc_feature (1018)..(1018): n is a, c, g, or t
  misc_feature (1020)..(1020): n is a, c, g, or t
  misc_feature (1022)..(1022): n is a, c, g, or t
  misc_feature (1025)..(1026): n is a, c, g, or t
  misc_feature (1030)..(1030): n is a, c, g, or t
  misc_feature (1036)..(1036): n is a, c, g, or t
  misc_feature (1039)..(1039): n is a, c, g, or t
  misc_feature (1041)..(1042): n is a, c, g, or t
  misc_feature (1053)..(1053): n is a, c, g, or t
  misc_feature (1055)..(1055): n is a, c, g, or t
ggcgggaccgagcaggaatccgtatctgggaacagagccctttgctcctccctcagaatgaacggagaccagaattcagatgtttatgcccaagaaaagcaggatttcgttcagcacttctcccagatcgttagggtgctgactgaggatgagatggggcacccagagataggagatgctattgcccggctcaaggaggtcctggagtacaatgccattggaggcaagtataaccggggtttgacggtggtagtagcattccgggagctggtggagccaaggaaacaggatgctgatagtctccagcgggcctggactgtgggctggtgtgtggaactgctgcaagctttcttcctggtggcagatgacatcatggattcatcccttacccgccggggacagatctgctggtatcagaagccgggcgtgggtttggatgccatcaatgatgctaacctcctggaagcatgtatctaccgcctgctgaagctctattgccgggagcagccctattacctgaacctgatcgagctcttcctgcagagttcctatcagactgagattgggcagaccctggacctcctcacagccccccagggcaatgtggatcttgtcagattcactgaaaagaggtacaaatctattgtcaagtacaagacagctttctactccttctaccttcctatagctgcagccatgtacatggcaggaattgatggcgagaaggagcacgccaatgccaagaagatcctgctggagatgggggagttctttcagattcaggatgattaccttgacctctttggggaccccagtgtgaccggcaaaattggcactgacatccaggacaacaaatgcagctggctggnggttcantgtctgcaacggnccctccnnaacagtaccnaatcctgaaggaaaattacgggcaaaagaggctgaaaaagtggcccgggtgaangccctaatgaaganctggatctgccaccantgttntngcaaantgaggaaaaaagtnancnccnnattntggctntcntnnaaaaaaagaananccc

SEQ ID NO: 84 - DNA, 1260 bp, Homo sapiens
  misc_feature (720)..(720): n is a, c, g, or t
  misc_feature (780)..(780): n is a, c, g, or t
  misc_feature (797)..(797): n is a, c, g, or t
  misc_feature (821)..(821): n is a, c, g, or t
  misc_feature (887)..(887): n is a, c, g, or t
  misc_feature (900)..(900): n is a, c, g, or t
  misc_feature (943)..(945): n is a, c, g, or t
  misc_feature (965)..(965): n is a, c, g, or t
  misc_feature (968)..(968): n is a, c, g, or t
  misc_feature (975)..(975): n is a, c, g, or t
  misc_feature (977)..(977): n is a, c, g, or t
  misc_feature (996)..(996): n is a, c, g, or t
  misc_feature (1002)..(1002): n is a, c, g, or t
  misc_feature (1010)..(1010): n is a, c, g, or t
  misc_feature (1012)..(1012): n is a, c, g, or t
  misc_feature (1016)..(1016): n is a, c, g, or t
  misc_feature (1024)..(1024): n is a, c, g, or t
  misc_feature (1028)..(1029): n is a, c, g, or t
  misc_feature (1036)..(1036): n is a, c, g, or t
  misc_feature (1041)..(1042): n is a, c, g, or t
  misc_feature (1046)..(1046): n is a, c, g, or t
  misc_feature (1077)..(1077): n is a, c, g, or t
  misc_feature (1081)..(1081): n is a, c, g, or t
  misc_feature (1089)..(1090): n is a, c, g, or t
  misc_feature (1098)..(1098): n is a, c, g, or t
  misc_feature (1114)..(1114): n is a, c, g, or t
  misc_feature (1117)..(1118): n is a, c, g, or t
  misc_feature (1121)..(1121): n is a, c, g, or t
  misc_feature (1135)..(1135): n is a, c, g, or t
  misc_feature (1138)..(1138): n is a, c, g, or t
  misc_feature (1152)..(1152): n is a, c, g, or t
  misc_feature (1158)..(1158): n is a, c, g, or t
  misc_feature (1162)..(1162): n is a, c, g, or t
  misc_feature (1167)..(1168): n is a, c, g, or t
  misc_feature (1175)..(1175): n is a, c, g, or t
  misc_feature (1179)..(1179): n is a, c, g, or t
  misc_feature (1186)..(1186): n is a, c, g, or t
  misc_feature (1188)..(1188): n is a, c, g, or t
  misc_feature (1209)..(1209): n is a, c, g, or t
  misc_feature (1213)..(1213): n is a, c, g, or t
  misc_feature (1226)..(1226): n is a, c, g, or t
  misc_feature (1231)..(1231): n is a, c, g, or t
  misc_feature (1239)..(1239): n is a, c, g, or t
  misc_feature (1244)..(1244): n is a, c, g, or t
  misc_feature (1246)..(1246): n is a, c, g, or t
  misc_feature (1255)..(1255): n is a, c, g, or t
ggtgagaccaccagccacctgatgggcatgttctaccgcaccattcgcatgatggagaacggcatcaagcccgtgtatgtctttgatggcaagccgccacagctcaagtcaggcgagctggccaaacgcagtgagcggcgggctgaggcagagaagcagctgcagcaggctcaggctgctggggccgagcaggaggtggaaaaattcactaagcggctggtgaaggtcactaagcagcacaatgatgagtgcaaacatctgctgagcctcatgggcatcccttatcttgatgcacccagtgaggcagaggccagctgtgctgccctggtgaaggctggcaaagtctatgctgcggctaccgaggacatggactgcctcaccttcggcagccctgtgctaatgcgacacctgactgccagtgaagccaaaaagctgccaatccaggaattccacctgagccggattctgcaggagctgggcctgaaccaggaacagtttgtggatctgtgcatcctgctaggcagtgactactgtgagagtatccggggtattgggcccaagcgggctgtggacctcatccagaagcacaagagcatcaagaggctgagtaagagccgccaaggcagcacccagggccgcctggatgatttcttcaaggtgaccggctcactctcttcagctaagcgcaaggagccagaacccaagggatccactaagaanaaggcaaagactggggcagcagggaagtttaaaaggggaaaataaatgtgtttccccatnatacctccttcacccanaatatttgccgtcttgtacccttnaaaagctacagctagaaaaaccttcacggggtggaagaaaggattctaaggcttttctagcgtganccttttcagaagngctaagtccctttttacttgatcttaatgggcaaaaaggcccnnnaggtacttttccttttttanctnagaaaantnttcaggttcaaaccccttntcaggnagtttatngnaccnaatccctntttnntgaaagnaaaannacancaattttgaaaaaaaaaaggaaaaaaagggnaaanaaaaattnnaaaaaatntttttggcggccactnggnnccnggggaagggggggnacnaaaaatggcttttntgtttnttcnccttnnccccctngaanaaccccncnaaggccccttttaaaatgganaacntttaaaaaaaggnaaacngccccccnaattngnttctttttnaaaaa

SEQ ID NO: 85 - DNA, 1218 bp, Homo sapiens
  misc_feature (953)..(953): n is a, c, g, or t
  misc_feature (956)..(956): n is a, c, g, or t
  misc_feature (976)..(976): n is a, c, g, or t
  misc_feature (983)..(983): n is a, c, g, or t
  misc_feature (1000)..(1000): n is a, c, g, or t
  misc_feature (1022)..(1022): n is a, c, g, or t
  misc_feature (1034)..(1034): n is a, c, g, or t
  misc_feature (1049)..(1049): n is a, c, g, or t
  misc_feature (1053)..(1053): n is a, c, g, or t
  misc_feature (1065)..(1066): n is a, c, g, or t
  misc_feature (1073)..(1073): n is a, c, g, or t
  misc_feature (1084)..(1084): n is a, c, g, or t
  misc_feature (1088)..(1088): n is a, c, g, or t
  misc_feature (1096)..(1096): n is a, c, g, or t
  misc_feature (1102)..(1102): n is a, c, g, or t
  misc_feature (1109)..(1109): n is a, c, g, or t
  misc_feature (1114)..(1114): n is a, c, g, or t
  misc_feature (1117)..(1117): n is a, c, g, or t
  misc_feature (1120)..(1121): n is a, c, g, or t
  misc_feature (1124)..(1124): n is a, c, g, or t
  misc_feature (1147)..(1147): n is a, c, g, or t
  misc_feature (1161)..(1161): n is a, c, g, or t
  misc_feature (1168)..(1168): n is a, c, g, or t
  misc_feature (1176)..(1176): n is a, c, g, or t
  misc_feature (1179)..(1179): n is a, c, g, or t
  misc_feature (1188)..(1188): n is a, c, g, or t
  misc_feature (1192)..(1192): n is a, c, g, or t
  misc_feature (1196)..(1196): n is a, c, g, or t
  misc_feature (1198)..(1198): n is a, c, g, or t
  misc_feature (1200)..(1200): n is a, c, g, or t
  misc_feature (1203)..(1203): n is a, c, g, or t
  misc_feature (1211)..(1211): n is a, c, g, or t
gcccactctctcgtaggcagcggcggcggcggcagcggtggggaaaagcggattccgccccctggcacacaggaatacattatgttacgacaagattccatccaatctgcggaattaaagaaaaaagagtccccctttcgtgctaagtgtcacgaaatcttctgctgcccgctgaagcaagtacaccacaaagagaacacagagccggaagagcctcagcttaagggtatagttaccaagctatacagccgacaaggctaccacttgcagctgcaggcggatggaaccattgatggcaccaaagatgaggacagcacttacactctgtttaacctcatccctgtgggtctgcgagtggtggctatccaaggagttcaaaccaagctgtacttggcaatgaacagtgagggatacttgtacacctcggaacttttcacacctgagtgcaaattcaaagaatcagtgtttgaaaattattatgtgacatattcatcaatgatataccgtcagcagcagtcaggccgagggtggtatctgggtctgaacaaagaaggagagatcatgaaaggcaaccatgtgaagaagaacaagcctgcagctcattttctgcctaaaccactgaaagtggccatgtacaaggagccatcactgcacgatctcacggagttctcccgatctggaagcgggaccccaaccaagagcagaagtgtctctggcgtgctgaacggaggcaaatccatgagccacaatgaatcaacgtagccagtgagggcaaaagaagggctctgtaacagaaccttacctccaggtgctgttgaattcttctagcagtccttcacccaaaagttcaaatttgtcagtgacatttaccaaacaaacaggcagagttcactattctatctgccattaaaccttcttatcatccatactaaagccccattatttaaattganctngtgcataaaaatgccaagcntttttantgaactaaatctgaaanaaggactgccaaattttcccangatcccccctanactttggggagaaantccnaaatatttcccnncctatgntgatcaaattngctncccccaanaaatgnaaaaacnaattnttnttnnaancaaccaaccaaccaaccaatttntgttttaatttttngcgggcnaaaaatanggnaatgggggntttngggngngnttncccccccnggaatca

SEQ ID NO: 86 - DNA, 754 bp, Homo sapiens
  misc_feature (516)..(516): n is a, c, g, or t
  misc_feature (568)..(568): n is a, c, g, or t
  misc_feature (570)..(570): n is a, c, g, or t
  misc_feature (635)..(635): n is a, c, g, or t
  misc_feature (657)..(657): n is a, c, g, or t
  misc_feature (661)..(661): n is a, c, g, or t
  misc_feature (666)..(667): n is a, c, g, or t
  misc_feature (683)..(683): n is a, c, g, or t
  misc_feature (691)..(691): n is a, c, g, or t
  misc_feature (707)..(707): n is a, c, g, or t
  misc_feature (712)..(712): n is a, c, g, or t
  misc_feature (719)..(719): n is a, c, g, or t
  misc_feature (721)..(721): n is a, c, g, or t
  misc_feature (723)..(723): n is a, c, g, or t
  misc_feature (726)..(726): n is a, c, g, or t
  misc_feature (737)..(737): n is a, c, g, or t
  misc_feature (739)..(739): n is a, c, g, or t
  misc_feature (741)..(742): n is a, c, g, or t
  misc_feature (746)..(746): n is a, c, g, or t
  misc_feature (753)..(753): n is a, c, g, or t
gcggcggcgtcgcgggcagctggcgccgcgcggtcctgctctgccggtcgcacggacgcaccggcgggccgccggccggagggacggggcgggagctgggcccgcggacagcgagccggagcgggagccgcgcgtagcgagccgggctccggcgctcgccagtctcccgagcggcgcccgcctcccgccggtgcccgcgccgggccgtggggggcagcatgcccgcgcgcgctgcctgaggacgccgcggcccccgcccccgccatgggcgcccctgcctgcgccctcgcgctctgcgtggccgtggccatcgtggccggcgcctcctcggagtccttggggacggagcagcgcgtcgtggggcgagcggcagaagtcccgggcccagagcccggccagcaggagcagttggtcttcggcagcggggatgctgtggagctgagctgtcccccgcccgggggtggtcccatggggcccactgtctgggtcaaggatggcacagggctggtgccctcngagcgtgtcctggtggggccccagcggctgcaggtgctgaatgcctcccacnangactccggggcctacagctgccggcagcggctcacgcaacgcgtactgtgccacttcagtgtgcnggtgacaaacgctccatcctcngganatgannaaaacggtgaaggacnaagctgangacacaggtgtggaanacaangggcccntnantgnaaaacggcccnancnngatnggaaaana

SEQ ID NO: 87 - DNA, 817 bp, Homo sapiens
gaaaatgtggccaagacagctaacaaggaccacttggttacagcctataaccatctttttgaaactaagcgttttaagggtactgaaagtataagtaaagtgtctgagcaagtaaaaaatgtgaagcttaatgaagataaacccaaagaaaccaagtctgaagagaccctggatgagggtccaccaaaatatactaaatctgttctgaaaaagggagataaaaccaactttcccaaaaagggagatgttgttcactgctggtatacaggaacactacaagatgggactgtttttgatactaatattcaaacaagtgcaaagaagaagaaaaatgccaagcctttaagttttaaggtcggagtaggcaaagttatcagaggatgggatgaagctctcttgactatgagtaaaggagaaaaggctcgactggagattgaaccagaatgggcttacggaaagaaaggacagcctgatgccaaaattccaccaaatgcaaaactcacttttgaagtggaattagtggatattgattgaaatagcagtgcttcagctctaaggatattagcaacaatgataaaacttggccttgaagaaatttacacaactagttagaacttgttactattgtaaaggaagagtcaactggaaaattcaaggagttaataaaatttgtttacttggtcccagcttttgagagataaatcccttatgaatccctggtctaaaatactttcctacagctgtgtaaaatactggtcaaggagaactttttccttttacctcatgttgtaaacttaagtggctcaataaaaattga

SEQ ID NO: 88 - DNA, 987 bp, Homo sapiens
  misc_feature (714)..(718): n is a, c, g, or t
  misc_feature (721)..(736): n is a, c, g, or t
  misc_feature (789)..(789): n is a, c, g, or t
  misc_feature (809)..(809): n is a, c, g, or t
  misc_feature (827)..(827): n is a, c, g, or t
  misc_feature (915)..(915): n is a, c, g, or t
  misc_feature (917)..(917): n is a, c, g, or t
  misc_feature (921)..(921): n is a, c, g, or t
  misc_feature (923)..(923): n is a, c, g, or t
  misc_feature (943)..(943): n is a, c, g, or t
  misc_feature (971)..(971): n is a, c, g, or t
  misc_feature (981)..(981): n is a, c, g, or t
gtgacgaccgcgtccacctcgcaggtgcgccagaactaccaccaggactcagaggccgccatcaaccgccagatcaacctggagctctacgcctcctacgtttacctgtccatgtcttactactttgaccgcgatgatgtggctttgaagaactttgccaaatactttcttcaccaatctcatgaggagagggaacatgctgagaaactgatgaagctgcagaaccaacgaggtggccgaatcttccttcaggatatcaagaaaccagactgtgatgactgggagagcgggctgaatgcaatggagtgtgcattacatttggaaaaaaatgtgaatcagtcactactggaactgcacaaactggccactgacaaaaatgacccccatttgtgtgacttcattgagacacattacctgaatgagcaggtgaaagccatcaaagaattgggtgaccacgtgaccaacttgcgcaagatgggagcgcccgaatctggcttggcggaatatctctttgacaagcacaccctgggagacagtgataatgaaagctaagcctcgggctaatttccccatagccgtggggtgacttccctggtcaccaaggcagtgcatgcatgttggggtttcctttaccttttctataagttgtaccaaaacatccacttaagttctttgatttgtaccattccttcaaataaagaaatttggtacccnnnnnaannnnnnnnnnnnnnnnaaaaaagggcggccgctccctatagtgagtcgtattaagcttaattagctgancttggactcctggttgatanatccagtaatgacctcanaactccatctggatttgttcaaaacgctcggttgccccccgggcgttttttattggtggaaaatccaagctagcttggggagattttncngggncntaaggaagctaaaatggganaaaaaaaatcccctgggaaatacccccngttgaaaatntcccaa

SEQ ID NO: 89 - DNA, 850 bp, Homo sapiens
  misc_feature (492)..(492): n is a, c, g, or t
  misc_feature (568)..(569): n is a, c, g, or t
  misc_feature (608)..(608): n is a, c, g, or t
  misc_feature (648)..(648): n is a, c, g, or t
  misc_feature (654)..(654): n is a, c, g, or t
  misc_feature (657)..(657): n is a, c, g, or t
  misc_feature (668)..(668): n is a, c, g, or t
  misc_feature (674)..(674): n is a, c, g, or t
  misc_feature (676)..(676): n is a, c, g, or t
  misc_feature (680)..(680): n is a, c, g, or t
  misc_feature (691)..(692): n is a, c, g, or t
  misc_feature (720)..(720): n is a, c, g, or t
  misc_feature (725)..(725): n is a, c, g, or t
  misc_feature (729)..(729): n is a, c, g, or t
  misc_feature (735)..(735): n is a, c, g, or t
  misc_feature (741)..(741): n is a, c, g, or t
  misc_feature (744)..(744): n is a, c, g, or t
  misc_feature (749)..(749): n is a, c, g, or t
  misc_feature (758)..(758): n is a, c, g, or t
  misc_feature (774)..(774): n is a, c, g, or t
  misc_feature (792)..(792): n is a, c, g, or t
  misc_feature (799)..(799): n is a, c, g, or t
  misc_feature (809)..(809): n is a, c, g, or t
  misc_feature (811)..(811): n is a, c, g, or t
  misc_feature (821)..(822): n is a, c, g, or t
  misc_feature (828)..(828): n is a, c, g, or t
  misc_feature (832)..(832): n is a, c, g, or t
  misc_feature (835)..(835): n is a, c, g, or t
  misc_feature (837)..(837): n is a, c, g, or t
  misc_feature (841)..(841): n is a, c, g, or t
  misc_feature (846)..(846): n is a, c, g, or t
gccaggcgcccgcccgccgcgcgtgattctcgcctcgccgcagcccagccctgcgcgccttgcccggcggcccccgcccggccgctccgggcccctggccccgcggagcgatgctgctgctggctgccgccttcctcgtggccttcgtgctgctgctgtacatggtgtctccgctcatcagccccaagcccctcgccctgcccggggcgcatgtggtggttacaggaggttccagtggcatcgggaagtgcattgctatcgagtgctataaacaaggagcttttataactctggttgcacgaaatgaggataagctgctgcaggcaaagaaagaaattgaaatgcactctattaatgacaaacaggtggtactttgcatatcagttgatgtatctcaagactataaccaagtagagaatgtcataaaacaagcacaggagaaactgggtccagtggacatgctggtaaattgtgcaggaatggcagtgtcangaaaatttgaaaatcttgaagttagtacctttgaaaggttaatgagcatcaattacctgggcagcgtgtaccccanncgggccgtgatcaccaccatgaaggaacgccgggtgggnagatcgtgtttgtgtcctcccaagaaggaaaattgggaantaattnagnttcaagcctantctgtntncaanttttgctatanngggattgggctaaaagcttttgccaaanggaangatnaaactnatatanatntttancatcaacanttgcattaacccaaanaaaaaaaaaaaaaccctnggttttnccaaaaaaananaaaaaaaatnnttttgnaaanttnancttntttcnaaaa

SEQ ID NO: 90 - DNA, 918 bp, Homo sapiens
  misc_feature (640)..(640): n is a, c, g, or t
  misc_feature (732)..(732): n is a, c, g, or t
  misc_feature (747)..(747): n is a, c, g, or t
  misc_feature (759)..(759): n is a, c, g, or t
  misc_feature (769)..(769): n is a, c, g, or t
  misc_feature (800)..(800): n is a, c, g, or t
  misc_feature (811)..(811): n is a, c, g, or t
  misc_feature (816)..(816): n is a, c, g, or t
  misc_feature (819)..(819): n is a, c, g, or t
  misc_feature (823)..(823): n is a, c, g, or t
  misc_feature (838)..(838): n is a, c, g, or t
  misc_feature (840)..(840): n is a, c, g, or t
  misc_feature (847)..(847): n is a, c, g, or t
  misc_feature (861)..(861): n is a, c, g, or t
  misc_feature (866)..(867): n is a, c, g, or t
  misc_feature (870)..(874): n is a, c, g, or t
  misc_feature (886)..(886): n is a, c, g, or t
  misc_feature (892)..(892): n is a, c, g, or t
  misc_feature (894)..(894): n is a, c, g, or t
  misc_feature (896)..(896): n is a, c, g, or t
  misc_feature (907)..(907): n is a, c, g, or t
  misc_feature (915)..(915): n is a, c, g, or t
  misc_feature (917)..(918): n is a, c, g, or t
gcggacgcgtgggcggagctggacctgacctacggcaacagatacaagaacgtgaagctccctgacgcctacgagcgcctcatcctggacgtcttctgcgggagccagatgcacttcgtgcgcagcgacgagctccgtgaggcctggcgtattttcaccccactgctgcaccagattgagctggagaagcccaagcccatcccctatatttatggcagccgaggccccacggaggcagacgagctgatgaagagagtgggtttccagtatgagggcacctacaagtgggtgaacccccacaagctctgagccctgggcacccacctccacccccgccacggccaccctccttcccgccgcccgaccccgagtcgggaggactccgggaccattgacctcagctgcacattcctggccccgggctctggccaccctggcccgcccctcgctgctgctactacccgagcccagctacattcctcagctgccaagcactcgagaccatcctggcccctccagaccctgcctgagcccaggagctgagtcacctcctccactcactccagcccaacagaaggaaggaggagggcgcccattcgtctgtcccagagcttattggccactgggtctcactcctgantggggccagggtgggagggagggacaagggggaggaaaggggcgagcacccacgtgagagaatctgcctgtggccttgcccgccagcctcantgccacttgacattnccttgtcaccancaacatctcnagccccctggatgtccccctgtcccaccaantctgcacttcnatggncancccngtgccacccgtaggnanccttctntgctataaaaaaancaaanncannnnntgggaacccctnccaacntnanggccctggccntttaaatncnn

SEQ ID NO: 91 - DNA, 1102 bp, Homo sapiens
  misc_feature (673)..(673): n is a, c, g, or t
  misc_feature (719)..(719): n is a, c, g, or t
  misc_feature (736)..(736): n is a, c, g, or t
  misc_feature (747)..(747): n is a, c, g, or t
  misc_feature (792)..(792): n is a, c, g, or t
  misc_feature (859)..(859): n is a, c, g, or t
  misc_feature (878)..(878): n is a, c, g, or t
  misc_feature (893)..(893): n is a, c, g, or t
  misc_feature (897)..(897): n is a, c, g, or t
  misc_feature (902)..(902): n is a, c, g, or t
  misc_feature (911)..(911): n is a, c, g, or t
  misc_feature (918)..(918): n is a, c, g, or t
  misc_feature (926)..(926): n is a, c, g, or t
  misc_feature (928)..(928): n is a, c, g, or t
  misc_feature (933)..(933): n is a, c, g, or t
  misc_feature (942)..(942): n is a, c, g, or t
  misc_feature (953)..(953): n is a, c, g, or t
  misc_feature (959)..(959): n is a, c, g, or t
  misc_feature (969)..(969): n is a, c, g, or t
  misc_feature (971)..(971): n is a, c, g, or t
  misc_feature (981)..(981): n is a, c, g, or t
  misc_feature (993)..(993): n is a, c, g, or t
  misc_feature (998)..(998): n is a, c, g, or t
  misc_feature (1002)..(1003): n is a, c, g, or t
  misc_feature (1012)..(1012): n is a, c, g, or t
  misc_feature (1014)..(1014): n is a, c, g, or t
  misc_feature (1017)..(1017): n is a, c, g, or t
  misc_feature (1019)..(1019): n is a, c, g, or t
  misc_feature (1027)..(1027): n is a, c, g, or t
  misc_feature (1047)..(1047): n is a, c, g, or t
  misc_feature (1053)..(1053): n is a, c, g, or t
  misc_feature (1057)..(1057): n is a, c, g, or t
  misc_feature (1060)..(1060): n is a, c, g, or t
  misc_feature (1062)..(1062): n is a, c, g, or t
  misc_feature (1077)..(1077): n is a, c, g, or t
  misc_feature (1081)..(1082): n is a, c, g, or t
  misc_feature (1085)..(1085): n is a, c, g, or t
  misc_feature (1087)..(1087): n is a, c, g, or t
gggaaaagtgtcccccctgagctcctaacgctccccaacagctacccctgccccccacgccatggggcccggggccccttttgcccgggtggggtggccactgccgcttctggttgtgatggcggcaggggtggctccggtgtgggcctcccactccccccatctcccgcggcctcactcgcgggtccccccgcacccctcctcagaacggcgcgcagtgtacatcggggcactgtttcccatgagcgggggctggccagggggccaggcctgccagcccgcggtggagatggcgctggaggacgtgaatagccgcagggacatcctgccggactatgagctcaagctcatccaccacgacagcaagtgtgatccaggccaagccaccaagtacctatatgagctgctctacaacgaccctatcaagatcatccttatgcctggctgcagctctgtctccacgctggtggctgaggctgctaggatgtggaacctcattgtgctttcctatggctccagctcaccagccctgtcaaaccggcagcgtttccccactttcttccgaacgcacccatcagccacactccacaaccctacccgcgtgaaactctttgaaaagtggggctggaagaagattgctaccatccagcagaccactgaggtcttcacttcnactctggacgacctggaggaacgagtgaaaggaggctggaattganattactttccgccagantttcttctcanatccagctgtgcccgtcaaaaacctgaaagcgccaggatgccccnaatcatcgtgggactttttctatgaaactgaagcccggaaaagttttttgtgaggtgtaaaaaggancgtctctttgggaaaaaantaagtctgggttccncatnggggnggaatgctnaaaattnggttcaanantttanaaacccttntattaaattgnaaaatngaataaaaanantgaagggggnggaagggcccanatcanaaannaaaattgtnantgntnaatcttgncaaaaacccccaaaattttnaaaatnaaanccnanaaatttgggaaaaantaannaancnattgaaaaaaaccct

SEQ ID NO: 92 - DNA, 1173 bp, Homo sapiens
  misc_feature (846)..(846): n is a, c, g, or t
  misc_feature (851)..(851): n is a, c, g, or t
  misc_feature (875)..(875): n is a, c, g, or t
  misc_feature (877)..(877): n is a, c, g, or t
  misc_feature (882)..(882): n is a, c, g, or t
  misc_feature (901)..(901): n is a, c, g, or t
  misc_feature (905)..(905): n is a, c, g, or t
  misc_feature (908)..(908): n is a, c, g, or t
  misc_feature (910)..(910): n is a, c, g, or t
  misc_feature (912)..(912): n is a, c, g, or t
  misc_feature (915)..(915): n is a, c, g, or t
  misc_feature (924)..(924): n is a, c, g, or t
  misc_feature (926)..(926): n is a, c, g, or t
  misc_feature (939)..(939): n is a, c, g, or t
  misc_feature (946)..(946): n is a, c, g, or t
  misc_feature (957)..(957): n is a, c, g, or t
  misc_feature (959)..(959): n is a, c, g, or t
  misc_feature (974)..(974): n is a, c, g, or t
  misc_feature (986)..(986): n is a, c, g, or t
  misc_feature (990)..(990): n is a, c, g, or t
  misc_feature (1022)..(1022): n is a, c, g, or t
  misc_feature (1049)..(1049): n is a, c, g, or t
  misc_feature (1055)..(1055): n is a, c, g, or t
  misc_feature (1059)..(1059): n is a, c, g, or t
  misc_feature (1063)..(1063): n is a, c, g, or t
  misc_feature (1066)..(1066): n is a, c, g, or t
  misc_feature (1074)..(1074): n is a, c, g, or t
  misc_feature (1080)..(1080): n is a, c, g, or t
  misc_feature (1082)..(1082): n is a, c, g, or t
  misc_feature (1087)..(1088): n is a, c, g, or t
  misc_feature (1090)..(1090): n is a, c, g, or t
  misc_feature (1102)..(1102): n is a, c, g, or t
  misc_feature (1107)..(1107): n is a, c, g, or t
  misc_feature (1114)..(1114): n is a, c, g, or t
  misc_feature (1130)..(1130): n is a, c, g, or t
  misc_feature (1137)..(1137): n is a, c, g, or t
  misc_feature (1142)..(1142): n is a, c, g, or t
  misc_feature (1159)..(1160): n is a, c, g, or t
  misc_feature (1163)..(1163): n is a, c, g, or t
  misc_feature (1167)..(1167): n is a, c, g, or t
gagagccctggctctttggggaggaacacacccgactcatccgagaagccatcagagagcgctatggcctcctgccatattggtattctctgttctaccatgcacacgtggcttcccaacctgtcatgaggcctctgtgggtagagttccctgatgaactaaagacttttgatatggaagatgaatacatgctggggagtgcattattggttcatccagtcacagaaccaaaagccaccacagttgatgtgtttcttccaggatcaaatgaggtaagagtaataacagccacatatctgatatgtctcatatctctcatcccttcttttcttttaggaaagagatttcttcatcatgtgtttgtgaacacaccccagatgactatagcaagtaattattataataagtcatgaccactgtcctcagaggtcaagaaacttaatggaggagaggagggagaaagatgaattggtgaggattccaaggaggatcagaatgatttttagtcttcacactttgactagtaaaagtgagtcctgataaacacaccgaggcttggggtaggaagaaatcttcagtctgctatgaggtatcaaactctgggggaaagcagatatgaagtgactttgctctttggtctggctctatctgaagcctgagtttttggtaccaaaagctggtctcaatacactcactgaagtgggtaaaaagtaaaaatagtgactcccctcccacattcctctgctcttttattagttattgtcactaattactgtcccaggtataaaatatcatcctagacctgctggagcccagggcactgaacccaggcagggcacagggganagganggaataccagcggtctgcaggcananagccntgggtaaaaaagcagcctncaanacngncncanaaaatccananggccagaaaaaanctggacnaaactcagtcncnaactaaggagagggngggaaggaaacngaangaacaacctaaagctcttgaccgggactgccnaggttcccagcgggaaacccccgttgnactggnggangccnccntttctggntgcagnanggagnntnaccgccctgttnaatgnggggggngaccgaaccccgcggncccaaantaggngggttttttgggggaannccncggnaaaaat

SEQ ID NO: 93 - DNA, 983 bp, Homo sapiens
  misc_feature (710)..(710): n is a, c, g, or t
  misc_feature (784)..(784): n is a, c, g, or t
  misc_feature (805)..(805): n is a, c, g, or t
  misc_feature (830)..(830): n is a, c, g, or t
  misc_feature (863)..(863): n is a, c, g, or t
  misc_feature (893)..(893): n is a, c, g, or t
  misc_feature (901)..(901): n is a, c, g, or t
  misc_feature (908)..(908): n is a, c, g, or t
  misc_feature (931)..(931): n is a, c, g, or t
  misc_feature (935)..(935): n is a, c, g, or t
  misc_feature (938)..(938): n is a, c, g, or t
  misc_feature (944)..(944): n is a, c, g, or t
  misc_feature (948)..(948): n is a, c, g, or t
  misc_feature (957)..(957): n is a, c, g, or t
  misc_feature (962)..(962): n is a, c, g, or t
  misc_feature (983)..(983): n is a, c, g, or t
ggtgagcaagcgagcagaaaagaggtggagagggggggaataagaaagagagagaaggaaaggagagaaggcaggaagaaggcaagggacgagacaaccatgctgtgctgtatgagaagaaccaaacaggttgaaaaaaatgatgacgaccaaaagattgaacaagatggtatcaaaccagaagataaagctcataaggccgcaaccaaaattcaggctagcttccgtggacacataacaaggaaaaagctcaaaggagagaagaaggatgatgtccaagctgctgaggctgaagctaataagaaggatgaagcccctgttgccgatggggtggagaagaagggagaaggcaccactactgccgaagcagccccagccactggctccaagcctgatgagcccggcaaagcaggagaaactccttccgaggagaagaagggggagggtgatgctgccacagagcaggcagccccccaggctcctgcatcctcagaggagaaggccggctcagctgagacagaaagtgccactaaagcttccactgataactcgccgtcctccaaggctgaagatgccccagccaaggaggagcctaaacaagccgatgtgcctgctgctgtcactgctgctgctgccaccacccctgccgcagaggatgctgctgccaaggcaacagcccagcctccaacggagactggggagagcagccnagctgaagagaacatagaagctgtagatgaaaccaaacctaaggaaagtgcccggcaggacgagggtaaagaanaggaacctgaggctgaccaanaacatgcctgaactctaaaaatggntttccacatccccccccctccccctctcctgancctgtctctccctacctcttctcagctccnctctgaantcccttncctgtcctgctcccgtctgggantctntcntttccncccnctaaccccnttttntttttgtgtggcaaccttttn

SEQ ID NO: 94 - DNA, 1122 bp, Homo sapiens
  misc_feature (799)..(799): n is a, c, g, or t
  misc_feature (828)..(828): n is a, c, g, or t
  misc_feature (840)..(840): n is a, c, g, or t
  misc_feature (885)..(885): n is a, c, g, or t
  misc_feature (906)..(906): n is a, c, g, or t
  misc_feature (912)..(912): n is a, c, g, or t
  misc_feature (931)..(931): n is a, c, g, or t
  misc_feature (936)..(936): n is a, c, g, or t
  misc_feature (951)..(951): n is a, c, g, or t
  misc_feature (964)..(964): n is a, c, g, or t
  misc_feature (990)..(990): n is a, c, g, or t
  misc_feature (992)..(992): n is a, c, g, or t
  misc_feature (999)..(999): n is a, c, g, or t
  misc_feature (1012)..(1012): n is a, c, g, or t
  misc_feature (1014)..(1014): n is a, c, g, or t
  misc_feature (1047)..(1047): n is a, c, g, or t
  misc_feature (1053)..(1053): n is a, c, g, or t
  misc_feature (1064)..(1064): n is a, c, g, or t
  misc_feature (1070)..(1070): n is a, c, g, or t
  misc_feature (1080)..(1080): n is a, c, g, or t
  misc_feature (1082)..(1084): n is a, c, g, or t
  misc_feature (1086)..(1086): n is a, c, g, or t
  misc_feature (1089)..(1089): n is a, c, g, or t
  misc_feature (1091)..(1091): n is a, c, g, or t
  misc_feature (1095)..(1095): n is a, c, g, or t
  misc_feature (1099)..(1099): n is a, c, g, or t
  misc_feature (1107)..(1108): n is a, c, g, or t
  misc_feature (1110)..(1110): n is a, c, g, or t
  misc_feature (1121)..(1121): n is a, c, g, or t
gcccacgcgtccgcttttgcgtcgccagccgagccacatcgctcagacaccatggggaaggtgaaggtcggagtcaacggatttggtcgtattgggcgcctggtcaccagggctgcttttaactctggtaaagtggatattgttgccatcaatgaccccttcattgacctcaactacatggtttacatgttccaatatgattccacccatggcaaattccatggcaccgtcaaggctgagaacgggaagcttgtcatcaatggaaatcccatcaccatcttccaggagcgagatccctccaaaatcaagtggggcgatgctggcgctgagtacgtcgtggagtccactggcgtcttcaccaccatggagaaggctggggctcatttgcaggggggagccaaaagggtcatcatctctgccccctctgctgatgcccccatgttcgtcatgggtgtgaaccatgagaagtatgacaacagcctcaagatcatcagcaatgcctcctgcaccaccaactgcttagcacccctggccaaggtcatccatgacaactttggtatcgtggaaggactcatgaccacagtccatgccatcactgccacccagaagactgtggatggcccctccgggaaactgtggcgtgatggccgcggggctctccagaacatcatccctgcctctactggcgctgccaaggctgtgggcaaggtcatccctgagctgaacgggaagctcactggcatggccttccgtgtccccactgccaacgtgtcagtggtggacctgacctgccgtctanaaaaacctgccaaatatgatgacatcaanaaggtggtgaancaggcgtcggaaggccccctcaagggcatcctgggctacactgancaccaggtggtctcctctganttcaanagcgaaacccactcctccnctttnaaagctggggctggnattgccctcaacnaccactttgtcaagctcatttctggnangaaaacnaatttggctacancnaaaaggggggggaacccatgggcccaatggccnccaagnaaaaaaaaccnggaacncccccccccncnnnanccnanaggnaaanaaaacccnncntgggggggaanc

SEQ ID NO: 95 - DNA, 982 bp, Homo sapiens
  misc_feature (705)..(705): n is a, c, g, or t
  misc_feature (756)..(756): n is a, c, g, or t
  misc_feature (794)..(794): n is a, c, g, or t
  misc_feature (806)..(806): n is a, c, g, or t
  misc_feature (813)..(813): n is a, c, g, or t
  misc_feature (822)..(822): n is a, c, g, or t
  misc_feature (842)..(842): n is a, c, g, or t
  misc_feature (849)..(849): n is a, c, g, or t
  misc_feature (857)..(857): n is a, c, g, or t
  misc_feature (874)..(874): n is a, c, g, or t
  misc_feature (891)..(891): n is a, c, g, or t
  misc_feature (909)..(909): n is a, c, g, or t
  misc_feature (916)..(916): n is a, c, g, or t
  misc_feature (921)..(921): n is a, c, g, or t
  misc_feature (936)..(936): n is a, c, g, or t
  misc_feature (940)..(940): n is a, c, g, or t
  misc_feature (944)..(944): n is a, c, g, or t
  misc_feature (948)..(949): n is a, c, g, or t
  misc_feature (958)..(958): n is a, c, g, or t
  misc_feature (964)..(965): n is a, c, g, or t
  misc_feature (969)..(969): n is a, c, g, or t
  misc_feature (976)..(976): n is a, c, g, or t
  misc_feature (980)..(980): n is a, c, g, or t
  misc_feature (982)..(982): n is a, c, g, or t
gcggacgcgtgggcggcggcggcggtggcggcggcgactgctgcggtgaaggaggaggaggagccgagcgggcgctggcaccgaggcctgaccatggacgaggaatacgatgtgatcgtgctggggaccggtctcaccgaatgcatcctgtcgggcatcatgtctgtgaacgggaagaaggtgctgcacatggaccggaacccctactacgggggcgagagctcctccatcacacccctggaggagctgtataagcgttttcagttgctggaggggccccctgagtcgatgggccgaggccgagactggaatgttgacctgattcccaaattcctcatggctaacgggcagctggtaaagatgctactgtatacagaggtgactcgctacctggacttcaaggtggtggagggcagctttgtctacaaggggggcaagatctacaaagtgccgtccactgagactgaggccttggcttccaatctgatgggcatgtttgagaaacggcgcttccgcaagttcctggtgtttgtggcaaacttcgatgagaatgaccccaagacctttgagggcgttgacccccagactaccagcatgcgtgacgtctaccggaagtttgatctgggccaggatgtcatcgatttcactggccatgccctggcgctctaccgcactgatgactacctggaccagccctgccttganaccgtcaaccgcatcaagttgtaaagtgagtccctggcccggtatggcaanaaccccatatttatacccgctctacggcttggggcganctgccccagggnttttgcnaaaattgantgcccatctatggggggganatatatngctgaacnaaaccttgttggatganatccttcttggaaaacngccagggttgttgggccntgaaatnttaangaaaaagttggcccncctncaancaannttatttttnaacccnnctanattcccngaancn

SEQ ID NO: 96 - DNA, 1067 bp, Homo sapiens
  misc_feature (829)..(829): n is a, c, g, or t
  misc_feature (862)..(862): n is a, c, g, or t
  misc_feature (872)..(872): n is a, c, g, or t
  misc_feature (914)..(914): n is a, c, g, or t
  misc_feature (917)..(917): n is a, c, g, or t
  misc_feature (919)..(919): n is a, c, g, or t
  misc_feature (930)..(930): n is a, c, g, or t
  misc_feature (941)..(941): n is a, c, g, or t
  misc_feature (943)..(944): n is a, c, g, or t
  misc_feature (946)..(946): n is a, c, g, or t
  misc_feature (951)..(951): n is a, c, g, or t
  misc_feature (966)..(966): n is a, c, g, or t
  misc_feature (976)..(976): n is a, c, g, or t
  misc_feature (987)..(987): n is a, c, g, or t
  misc_feature (1004)..(1005): n is a, c, g, or t
  misc_feature (1010)..(1010): n is a, c, g, or t
  misc_feature (1017)..(1017): n is a, c, g, or t
  misc_feature (1026)..(1027): n is a, c, g, or t
  misc_feature (1031)..(1031): n is a, c, g, or t
  misc_feature (1033)..(1033): n is a, c, g, or t
  misc_feature (1039)..(1039): n is a, c, g, or t
  misc_feature (1042)..(1042): n is a, c, g, or t
  misc_feature (1054)..(1054): n is a, c, g, or t
  misc_feature (1056)..(1056): n is a, c, g, or t
  misc_feature (1059)..(1059): n is a, c, g, or t
  misc_feature (1067)..(1067): n is a, c, g, or t
gagcgcaacgaggagaaggcgcagcgtgaggccaacaaaaagatcgagaagcagctgcagaaggacaagcaggtctaccgggccacgcaccgcctgctgctgctgggtgctggagaatctggtaaaagcaccattgtgaagcagatgaggatcctgcatgttaatgggtttaatggagatgagaaggcaaccaaagtgcaggacatcaaaaacaacctgaaagaggcgattgaaaccattgtggccgccatgagcaacctggtgccccccgtggagctggccaaccccgagaaccagttcagagtggactacattctgagtgtgatgaacgtgcctgactttgacttccctcccgaattctatgagcatgccaaggctctgtgggaggatgaaggagtgcgtgcctgctacgaacgctccaacgagtaccagctgattgactgtgcccagtacttcctggacaagatcgacgtgatcaagcaggctgactatgtgccgagcgatcaggacctgcttcgctgccgtgtcctgacttctggaatctttgagaccaagttccaggtggacaaagtcaacttccacatgtttgacgtgggtggccagcgcgatgaacgccgcaagtggatccagtgcttcaacgatgtgactgccatcatcttcgtggtggccagcagcagctacaacatggtcatccgggaggacaaccagaccaaccgcctgcaggaggctctgaacctcttcaagagcatctggaaacaacagatggctgcgcaccatctctgtgatcctgttcctcaacaagcaagatctgctcgctgagaaagtcctngctgggaaatcgaaaatgaggactactttccanaatttgctcnctaccctactcctgaggatgctactcccgagcccgaaaaganccncncgtgacccggncaagtacttcntnnanatgantttctgaagatcacnctgccattgnaaagggcgtcntactgctaccctcattnncctgncctgggnaactgaaanntccncnggggtncangactgccggaantnttnacgcatgn

SEQ ID NO: 97 - DNA, 870 bp, Homo sapiens
  misc_feature (755)..(755): n is a, c, g, or t
  misc_feature (810)..(810): n is a, c, g, or t
  misc_feature (839)..(840): n is a, c, g, or t
  misc_feature (848)..(848): n is a, c, g, or t
  misc_feature (850)..(870): n is a, c, g, or t
gtgatcactacctgctatggagggcggaaccggaaagtggctgaggcctttgcgcgtacaggaaagtccattgagcagctggagaaagagttgctgaatgggcagaaactgcaggggcccgagacagcccgggagctatacagcatcctccagcacaagggcctggtagacaagtttcccttgttcatggctgtgtacaaggtgtgctacgagggccagccagtgggtgaattcatccactgcctgcagaatcatccagaacatatgtgagtggggccagggcccaggccaggccgcttttttaccccagtggagaccagcagaagcctggggtacctagtcaccaggatctccaggactcccagggagcagagtcttctcatcttttcactggaggacaggaggctatggggcccagctacgcacctggagatcctgaactgtcaagccactggcagcctcatgccaccacatttgccagaaatgcagttgccctgtccctctccagatgtggggctttctccatatcctctgggaggggtggaatcaagccccagtgctgcctgcttggtggcgggggtgatgtatgtggagaagggttgggggagaggccggtagggcaggggctgctagtggctgtctcacatacaccagtaatcctgttaaagggctgaagaagtatcttagccacaggagcgatgaggcaaggattgtcagggaggggtctgggcttctgagctgatgcaggccccaanggacccctttgctgacctctgccaggacccacacagcttcgatggatctcagtgntttgttaacaaaatacaagatctcaaccnnaaaaaaanannnnnnnnnnnnnnnnnnnnn

SEQ ID NO: 98 - DNA, 673 bp, Homo sapiens
  misc_feature (8)..(8): n is a, c, g, or t
  misc_feature (15)..(15): n is a, c, g, or t
  misc_feature (23)..(23): n is a, c, g, or t
  misc_feature (30)..(30): n is a, c, g, or t
  misc_feature (37)..(37): n is a, c, g, or t
  misc_feature (48)..(49): n is a, c, g, or t
  misc_feature (51)..(51): n is a, c, g, or t
  misc_feature (53)..(53): n is a, c, g, or t
  misc_feature (58)..(58): n is a, c, g, or t
  misc_feature (72)..(72): n is a, c, g, or t
  misc_feature (96)..(96): n is a, c, g, or t
  misc_feature (109)..(109): n is a, c, g, or t
  misc_feature (149)..(149): n is a, c, g, or t
  misc_feature (156)..(156): n is a, c, g, or t
  misc_feature (160)..(160): n is a, c, g, or t
  misc_feature (163)..(163): n is a, c, g, or t
  misc_feature (209)..(210): n is a, c, g, or t
  misc_feature (225)..(225): n is a, c, g, or t
  misc_feature (227)..(227): n is a, c, g, or t
  misc_feature (230)..(230): n is a, c, g, or t
  misc_feature (232)..(232): n is a, c, g, or t
  misc_feature (235)..(235): n is a, c, g, or t
  misc_feature (237)..(237): n is a, c, g, or t
  misc_feature (278)..(278): n is a, c, g, or t
  misc_feature (318)..(318): n is a, c, g, or t
  misc_feature (365)..(365): n is a, c, g, or t
  misc_feature (389)..(389): n is a, c, g, or t
  misc_feature (391)..(391): n is a, c, g, or t
  misc_feature (397)..(397): n is a, c, g, or t
  misc_feature (426)..(426): n is a, c, g, or t
  misc_feature (435)..(436): n is a, c, g, or t
  misc_feature (438)..(438): n is a, c, g, or t
  misc_feature (441)..(441): n is a, c, g, or t
  misc_feature (454)..(454): n is a, c, g, or t
  misc_feature (459)..(459): n is a, c, g, or t
  misc_feature (478)..(478): n is a, c, g, or t
  misc_feature (513)..(513): n is a, c, g, or t
  misc_feature (519)..(519): n is a, c, g, or t
  misc_feature (522)..(522): n is a, c, g, or t
  misc_feature (531)..(531): n is a, c, g, or t
  misc_feature (553)..(553): n is a, c, g, or t
  misc_feature (556)..(556): n is a, c, g, or t
  misc_feature (565)..(565): n is a, c, g, or t
  misc_feature (575)..(575): n is a, c, g, or t
  misc_feature (578)..(578): n is a, c, g, or t
  misc_feature (591)..(591): n is a, c, g, or t
  misc_feature (595)..(596): n is a, c, g, or t
  misc_feature (607)..(609): n is a, c, g, or t
  misc_feature (625)..(625): n is a, c, g, or t
  misc_feature (627)..(627): n is a, c, g, or t
  misc_feature (632)..(632): n is a, c, g, or t
  misc_feature (635)..(635): n is a, c, g, or t
  misc_feature (654)..(654): n is a, c, g, or t
ggttcagnctacgtnagcaaggntgagtcnaccccanagattgccgannancnagganagcgtgacagccanacccaggccatcctcaccaagctnaagtgtgccgcangcttggcagagctggccgccaggaagtacaagcaggctgncaagtgnctcntgntggcttcctttgatcactgtgacttccctgagctgctgtcccccannaacgtggccatctangntgncntgngngccttggctacctttgaccggcaggagctgcagcgcaatgncatctccagcagctccttcaagttgttcttggagctgganccacaggtccgagacatcatcttcaaattctactcagtccaagtacncctcatgtctcaagatgctggaananatgaangacaacctgctcatggacatgtatctggncccccatgnnangancctgtacacccanattcncaaccgtgccctcatccantatttcagcccctacgtgtcagccgacatgcatangatggnggnagccttcantaccacggtggccgccctggangangagctgacncagctaatcntgnaggggctgatcantgcnngtgtggactcnnncagcaagatcctatantnccggnacntggatcaacgcatcaccanctttgataagtctctgttg

SEQ ID NO: 99 - DNA, 564 bp, Homo sapiens
  misc_feature (564)..(564): n is a, c, g, or t
gccaagaacgaagagattctgaattccctcaagtacgtccggcctggtggtgggttcgagcccaacttcatgctcttcgagaagtgcgaggtgaacggtgcgggggcgcaccctctcttcgccttcctgcgggaggccctgccagctcccagcgacgacgccaccgcgcttatgaccgaccccaagctcatcacctggtctccggtgtgtcgcaacgatgttgcctggaactttgagaagttcctggtgggccctgacggtgtgcccctacgcaggtacagccgccgcttccagaccattgacatcgagcctgacatcgaagccctgctgtctcaagggcccagctgtgcctagggcgcccctcctaccccggctgcttggcagttgcagtgctgctgtctcgggggggttttcatctatgagggtgtttcctctaaacctacgagggaggaacacctgatcttacagaaaataccacctcgagatgggtgctggtcctgttgatcccagtctctgccagaccaaggcgagtttccccactaataaagtgccgggtgtcagcan

SEQ ID NO: 100 - DNA, 849 bp, Homo sapiens
ggacgaggggaggagccgctggctcccagccccgccgcgatgagcctcggccgcctttgccgcctactgaagccggcgctgctctgtggggctctggccgcgcctggcctggccgggaccatgtgcgcgtcccgggacgactggcgctgtgcgcgctccatgcacgagttttccgccaaggacatcgacgggcacatggttaacctggacaagtaccggggcttcgtgtgcatcgtcaccaacgtggcctcccagtgaggcaagaccgaagtaaactacactcagctcgtcgacctgcacgcccgatacgctgagtgtggtttgcggatcctggccttcccgtgtaaccagttcgggaagcaggagccagggagtaacgaagagatcaaagagttcgccgcgggctacaacgtcaaattcgatatgttcagcaagatctgcgtgaacggggacgacgcccacccgctgtggaagtggatgaagatccaacccaagggcaagggcatcctgggaaatgccatcaagtggaacttcaccaagttcctcatcgacaagaacggctgcgtggtgaagcgctacggacccatggaggagcccctggtgatagagaaggacctgccccactatttctagctccacaagtgtgtggccccgcccgagcccctgcccacgcccttggagccttccaccggcactcatgacggcctgcctgcaaacctgctggtggggcagaacccgaaaatccagcgtgcaccccgccggaggaaggtccccatggcctgctgggcttggctcggcgccccacccctggctaccttgtgggaataaacagacaaattagcctgctgg

SEQ ID NO: 101 - DNA, 839 bp, Homo sapiens
  misc_feature (830)..(830): n is a, c, g, or t
gatccgtggttttttggcaaaatccccagagccaaggcagaagaaatgcttagcaaacagcggcacgatggggcctttcttatccgagagagtgagagcgctcctggggacttctccctctctgtcaagtttggaaacgatgtgcagcacttcaaggtgctccgagatggagccgggaagtacttcctctgggtggtgaagttcaattctttgaatgagctggtggattatcacagatctacatctgtctccagaaaccagcagatattcctgcgggacatagaacaggtgccacagcagccgacatacgtccaggccctctttgactttgatccccaggaggatggagagctgggcttccgccggggagattttatccatgtcatggataactcagaccccaactggtggaaaggagcttgccacgggcagaccggcatgtttccccgcaattatgtcacccccgtgaaccggaacgtctaagagtcaagaagcaattatttaaagaaagtgaaaaatgtaaaacacatacaaaagaattaaacccacaagctgcctctgacagcagcctgtgagggagtgcagaacacctggccgggtcaccctgtgaccctctcactttggttggaactttagggggtgggagggggcgttggatttaaaaatgccaaaacttacctataaattaagaagagtttttattacaaattttcactgctgctcctctttcccctcctttgtcttttttttcatccttttttctcttctgtccatcagtgcatgacgtttaaggccacgtatagtcctagctgacgcccataataaaaaancaagaaacc

SEQ ID NO: 102 - DNA, 702 bp, Homo sapiens
  misc_feature (580)..(580): n is a, c, g, or t
  misc_feature (628)..(628): n is a, c, g, or t
  misc_feature (632)..(632): n is a, c, g, or t
  misc_feature (649)..(649): n is a, c, g, or t
  misc_feature (660)..(661): n is a, c, g, or t
  misc_feature (664)..(664): n is a, c, g, or t
  misc_feature (667)..(667): n is a, c, g, or t
  misc_feature (669)..(670): n is a, c, g, or t
  misc_feature (673)..(673): n is a, c, g, or t
  misc_feature (680)..(680): n is a, c, g, or t
  misc_feature (689)..(689): n is a, c, g, or t
  misc_feature (694)..(694): n is a, c, g, or t
  misc_feature (697)..(697): n is a, c, g, or t
  misc_feature (700)..(700): n is a, c, g, or t
ggtaccagcgcatgtggaactacatgcagtcgaagcagcccagcgtgttcgtcaagagcacagaagagggcattgcccgcgtcctcaactcccgctacgccttcctgctcgagtccaccatgaacgaataccaccggcgcctcaactgcaacctcacccagatcgggggactcctcgacaccaagggctacggcattggcatgccgctgggctccccgttccgggatgagatcacactggccatcctgcagcttcaggagaacaaccggctggagatcctgaagcgcaagtggtgggaggggggccggtgccccaaggaggaggaccatcgagctaaaggtttgggcatggagaacattggtggcatttttatcgtgctcatctgtggcctcatcattgctgtcttcgtggcggtcatggaattcatatggtccacacggaggtcagctgagtccgaggaggtgtcggtgtgccaggagatgctgcaggagctgcgccacgccgtttcttgccgcaagacgtcgcgttcccgccggcgccgacgcccgggcggcccgagccgggccctgctgtcactgcncgcggtccgcgagatgcgcctcaacacggcaagctctactcggccggngcgngcggggatgcgggcagngcgcacggggnnccncancnnctnctggaanacccggggnccccnaancgnaa

SEQ ID NO: 103 - DNA, 944 bp, Homo sapiens
  misc_feature (743)..(743): n is a, c, g, or t
  misc_feature (751)..(751): n is a, c, g, or t
  misc_feature (753)..(753): n is a, c, g, or t
  misc_feature (783)..(783): n is a, c, g, or t
  misc_feature (785)..(785): n is a, c, g, or t
  misc_feature (803)..(803): n is a, c, g, or t
  misc_feature (816)..(816): n is a, c, g, or t
  misc_feature (829)..(829): n is a, c, g, or t
  misc_feature (837)..(837): n is a, c, g, or t
  misc_feature (845)..(845): n is a, c, g, or t
  misc_feature (851)..(851): n is a, c, g, or t
  misc_feature (874)..(874): n is a, c, g, or t
  misc_feature (879)..(879): n is a, c, g, or t
  misc_feature (887)..(887): n is a, c, g, or t
  misc_feature (891)..(891): n is a, c, g, or t
  misc_feature (901)..(901): n is a, c, g, or t
  misc_feature (906)..(906): n is a, c, g, or t
  misc_feature (908)..(908): n is a, c, g, or t
  misc_feature (913)..(913): n is a, c, g, or t
  misc_feature (915)..(915): n is a, c, g, or t
  misc_feature (923)..(923): n is a, c, g, or t
  misc_feature (931)..(933): n is a, c, g, or t
  misc_feature (937)..(937): n is a, c, g, or t
  misc_feature (942)..(942): n is a, c, g, or t
gcctacccccaagggggctacccccaggggccatatccccagagccccttcccccccaacccctatggacagccacaggtcttcccaggacaagaccctgactcaccccagcatggaaactaccaggaggagggtcccccatcctactatgacaaccaggacttccctgccaccaactgggatgacaagagcatccgacaggccttcatccgcaaggtgttcctagtgctgaccttgcagctgtcggtgaccctgtccacggtgtctgtgttcacttttgttgcggaggtgaagggctttgtccgggagaatgtctggacctactatgtctcctatgctgtcttcttcatctctctcatcgtcctcagctgttgtggggacttccggcgaaagcacccctggaaccttgttgcactgtcggtcctgaccgccagcctgtcgtacatggtggggatgatcgccagcttctacaacaccgaggcagtcatcatggccgtgggcatcaccacagccgtctgcttcaccgtcgtcatcttctccatgcagacccgctacgacttcacctcatgcatgggcgtgctcctggtgagcatggtggtgctcttcatcttcgccattctctgcatcttcatccggaaccgcatcctggagatcgtgtacgcctcactgggcgctctgctcttcacctgcttcctcgcagtggacacccagctgctgctggggaacaagcagctgtccctgancccagaanantatgtgtttgctgcgctgaaacctgtacananacatcatcaacatcttcntgtaatcctcacnatcattggccgcnccaaggantaaccganctccanctcgctgtgcccgctcaggtggnacggntggcctgnaacntgcccctggnacggnantgccnantgtacttncccctctnnnttgnccccnag

SEQ ID NO: 104 - DNA, 759 bp, Homo sapiens
  misc_feature (556)..(556): n is a, c, g, or t
  misc_feature (575)..(575): n is a, c, g, or t
  misc_feature (629)..(629): n is a, c, g, or t
  misc_feature (638)..(638): n is a, c, g, or t
  misc_feature (644)..(644): n is a, c, g, or t
  misc_feature (651)..(651): n is a, c, g, or t
  misc_feature (657)..(657): n is a, c, g, or t
  misc_feature (663)..(663): n is a, c, g, or t
  misc_feature (674)..(674): n is a, c, g, or t
  misc_feature (676)..(676): n is a, c, g, or t
  misc_feature (680)..(680): n is a, c, g, or t
  misc_feature (687)..(687): n is a, c, g, or t
  misc_feature (703)..(704): n is a, c, g, or t
  misc_feature (706)..(706): n is a, c, g, or t
  misc_feature (708)..(708): n is a, c, g, or t
  misc_feature (728)..(728): n is a, c, g, or t
  misc_feature (730)..(731): n is a, c, g, or t
  misc_feature (733)..(734): n is a, c, g, or t
  misc_feature (738)..(738): n is a, c, g, or t
  misc_feature (743)..(744): n is a, c, g, or t
  misc_feature (747)..(747): n is a, c, g, or t
  misc_feature (749)..(749): n is a, c, g, or t
  misc_feature (752)..(753): n is a, c, g, or t
  misc_feature (755)..(755): n is a, c, g, or t
gccgccgcagtcttcgccaccatgccgccctacaccgtggtctatttcccagttcgaggccgctgcgcggccctgcgcatgctgctggcagatcagggccagagctggaaggaggaggtggtgaccgtggagacgtggcaggagggctcactcaaagcctcctgcctatacgggcagctccccaagttccaggacggagacctcaccctgtaccagtccaataccatcctgcgtcacctgggccgcacccttgggctctatgggaaggaccagcaggaggcagccctggtggacatggtgaatgacggcgtggaggacctccgctgcaaatacatctccctcatctacaccaactatgaggcgggcaaggatgactatgtgaaggcactgcccgggcaactgaagccttttgagaccctgctgtcccagaaccagggaggcaagaccttcattgtgggagaccagatctccttcgctgactacaacctgctggacttgctgctgatccatgaggtcctagcccctggctgcctggatgcgttccccctgctctcancatatgtggggcgcctcantgcccggcccaaactcaaggccttcctggcctcccctgatacgtgaacctcccnatcaatggnaacggnaaaaaantgaggnttgggngggactctgancnggangcaaaantttgccttccttttcnncnanaccaataaaaattttctaanannannaaanaaaannaananaannanaaag

SEQ ID NO: 105 - DNA, 1125 bp, Homo sapiens
  misc_feature (766)..(766): n is a, c, g, or t
  misc_feature (804)..(804): n is a, c, g, or t
  misc_feature (809)..(809): n is a, c, g, or t
  misc_feature (835)..(835): n is a, c, g, or t
  misc_feature (845)..(845): n is a, c, g, or t
  misc_feature (856)..(856): n is a, c, g, or t
  misc_feature (877)..(877): n is a, c, g, or t
  misc_feature (880)..(880): n is a, c, g, or t
  misc_feature (887)..(887): n is a, c, g, or t
  misc_feature (891)..(891): n is a, c, g, or t
  misc_feature (898)..(898): n is a, c, g, or t
  misc_feature (905)..(905): n is a, c, g, or t
  misc_feature (910)..(910): n is a, c, g, or t
  misc_feature (915)..(915): n is a, c, g, or t
  misc_feature (918)..(918): n is a, c, g, or t
  misc_feature (939)..(939): n is a, c, g, or t
  misc_feature (945)..(945): n is a, c, g, or t
  misc_feature (950)..(950): n is a, c, g, or t
  misc_feature (961)..(961): n is a, c, g, or t
  misc_feature (973)..(973): n is a, c, g, or t
  misc_feature (975)..(975): n is a, c, g, or t
  misc_feature (977)..(977): n is a, c, g, or t
  misc_feature (980)..(980): n is a, c, g, or t
  misc_feature (989)..(989): n is a, c, g, or t
  misc_feature (1008)..(1008): n is a, c, g, or t
  misc_feature (1022)..(1022): n is a, c, g, or t
  misc_feature (1025)..(1025): n is a, c, g, or t
  misc_feature (1027)..(1028): n is a, c, g, or t
  misc_feature (1038)..(1038): n is a, c, g, or t
  misc_feature (1042)..(1042): n is a, c, g, or t
  misc_feature (1044)..(1044): n is a, c, g, or t
  misc_feature (1058)..(1058): n is a, c, g, or t
  misc_feature (1063)..(1063): n is a, c, g, or t
  misc_feature (1068)..(1068): n is a, c, g, or t
  misc_feature (1070)..(1070): n is a, c, g, or t
  misc_feature (1075)..(1075): n is a, c, g, or t
  misc_feature (1078)..(1078): n is a, c, g, or t
  misc_feature (1082)..(1082): n is a, c, g, or t
  misc_feature (1088)..(1088): n is a, c, g, or t
  misc_feature (1097)..(1099): n is a, c, g, or t
  misc_feature (1109)..(1109): n is a, c, g, or t
gctgctcctgccgctcccgctgccgcgcctcctgcggagaaggcccctgtaaagaagaaggcggccaaaaaggctgggggtacgcctcgtaaggcgtccggtcccccggtgtcagagctcatcaccaaggctgtggccgcctctaaagagcgtagcggagtttctctggctgctctgaaaaaagcgttggctgccgccggctatgatgtggagaaaaacaacagccgtatcaaacttggtctcaagagcctggtgagcaagggcactctggtgcaaacgaaaggcaccggtgcttctggctcctttaaactcaacaagaaggcagcctccggggaagccaagcccaaggttaaaaaggcgggcggaaccaaacctaagaagccagttggggcagccaagaagcccaagaaggcggctggcggcgcaactccgaagaagagcgctaagaaaacaccgaagaaagcgaagaagccggccgcggccactgtaaccaagaaagtggctaagagcccaaagaaggccaaggttgcgaagcccaagaaagctgccaaaagtgctgctaaggctgtgaagccgaaggccgctaagcccaaggttgtcaagcctaagaaggcggcgcccaagaagaaataggcgaacgcctacttctaaaacccaaaaggctcttttcagagccaccactgatctcaataaaagagctggataatttctttactatctgccttttcttgttctgccctgttacttaaggttagtcgtatggganttactgaggtatcaaaaacaaattgggtgacggggttngaaantggccgtggtgaggttacagcatttnaacctttatngcggcttctangtccctgaccggaggcttttntcnctggcgnatgnttttggnatggcantcccnccccnagncctgtgaacggcaaaaaaacncaaaanaaaanccattttttantctaagggattncngnatngactaaaanttttcaaaatcccccctgntcccgggtgggccnttntnnaaaaaaagantttntncggaattaatgganggggnaaaantngcttnttngggntttttncttacgggnnntaaaattttncccttttcttttaata

SEQ ID NO: 106 - DNA, 881 bp, Homo sapiens
  misc_feature (701)..(701): n is a, c, g, or t
  misc_feature (703)..(703): n is a, c, g, or t
  misc_feature (763)..(763): n is a, c, g, or t
  misc_feature (771)..(771): n is a, c, g, or t
  misc_feature (787)..(787): n is a, c, g, or t
  misc_feature (828)..(829): n is a, c, g, or t
  misc_feature (837)..(837): n is a, c, g, or t
  misc_feature (842)..(842): n is a, c, g, or t
  misc_feature (849)..(849): n is a, c, g, or t
  misc_feature (857)..(857): n is a, c, g, or t
  misc_feature (869)..(869): n is a, c, g, or t
  misc_feature (871)..(872): n is a, c, g, or t
  misc_feature (878)..(878): n is a, c, g, or t
gcccgaaccaagcagactgctcgtaagtccaccggtgggaaagccccccgcaaacagctggccacgaaagccgccaggaaaagcgctccctctaccggcggggtgaagaagcctcatcgctacaggcccgggaccgtggcgcttcgagagattcgtcgttatcagaagtcgaccgagctgctcatccggaagctgcccttccagaggttggtgagggagatcgcgcaggatttcaaaaccgacctgaggtttcagagcgcagccatcggtgcgctgcaggaggctagcgaagcgtacctggtgggtctgttcgaagataccaacctgtgtgccatccacgctaagagagtcaccatcatgcccaaagacatccagttggctcgccggatacggggagagagagcttaagtgaaggcagtttttatggcgttttgtagtaaattctgtaaaatactttggtttaatttgtgactttttttgtaagaaattgtttataatatgttgcatttgtacttaagtcattccatctttcactcaggatgaatgcgaaaagtgactgttcacagacctcagtgatgtgagcactgttgctcaggagtgacaagttgctaatatgcagaagggatgggtgatacttcttgcttctcatgatgcatgtttctgtatgttaatgacttgttgggtagctattaaggtactananttgataaatgtgtacagggtccttttgcaataaaactgggttatgacttgatccaagtgntttaacanttgggggctgttaaantctgaacatacatccctgggaaaaaaatggggggctttttnnaagggggnaaaanacaagtnttaaaccncagtgtaacttnannttttcnttt

SEQ ID NO: 107 - DNA, 581 bp, Homo sapiens
  misc_feature (563)..(564): n is a, c, g, or t
  misc_feature (566)..(566): n is a, c, g, or t
  misc_feature (569)..(575): n is a, c, g, or t
  misc_feature (578)..(581): n is a, c, g, or t
gcacagactcagagagaacccaccatggtgctgtctcctgccgacaagaccaacgtcaaggccgcctggggtaaggtcggcgcgcacgctggcgagtatggtgcggaggccctggagaggatgttcctgtccttccccaccaccaagacctacttcccgcacttcgacctgagccacggctctgcccaggttaagggccacggcaagaaggtggccgacgcgctgaccaacgccgtggcgcacgtggacgacatgcccaacgcgctgtccgccctgagcgacctgcacgcgcacaagcttcgggtggacccggtcaacttcaagctcctaagccactgcctgctggtgaccctggccgcccacctccccgccgagttcacccctgcggtgcacgcctccctggacaagttcctggcttctgtgagcaccgtgctgacctccaaataccgttaagctggagcctcggtagccgttcctcctgcccgctgggcctcccaacgggccctcctcccctccttgcaccggcccttcctggtctttgaataaagtctgagtgggcggcnnanaannnnnnnaannnn

SEQ ID NO: 108 - DNA, 1293 bp, Homo sapiens
  misc_feature (760)..(760): n is a, c, g, or t
  misc_feature (786)..(786): n is a, c, g, or t
  misc_feature (818)..(818): n is a, c, g, or t
  misc_feature (837)..(837): n is a, c, g, or t
  misc_feature (847)..(847): n is a, c, g, or t
  misc_feature (859)..(859): n is a, c, g, or t
  misc_feature (862)..(862): n is a, c, g, or t
  misc_feature (870)..(870): n is a, c, g, or t
  misc_feature (876)..(876): n is a, c, g, or t
  misc_feature (891)..(891): n is a, c, g, or t
  misc_feature (898)..(898): n is a, c, g, or t
  misc_feature (913)..(913): n is a, c, g, or t
  misc_feature (916)..(916): n is a, c, g, or t
  misc_feature (922)..(922): n is a, c, g, or t
  misc_feature (963)..(963): n is a, c, g, or t
  misc_feature (967)..(967): n is a, c, g, or t
  misc_feature (969)..(969): n is a, c, g, or t
  misc_feature (985)..(985): n is a, c, g, or t
  misc_feature (993)..(993): n is a, c, g, or t
  misc_feature (1001)..(1001): n is a, c, g, or t
  misc_feature (1003)..(1003): n is a, c, g, or t
  misc_feature (1018)..(1018): n is a, c, g, or t
  misc_feature (1044)..(1044): n is a, c, g, or t
  misc_feature (1047)..(1047): n is a, c, g, or t
  misc_feature (1049)..(1050): n is a, c, g, or t
  misc_feature (1054)..(1054): n is a, c, g, or t
  misc_feature (1075)..(1075): n is a, c, g, or t
  misc_feature (1084)..(1085): n is a, c, g, or t
  misc_feature (1089)..(1089): n is a, c, g, or t
  misc_feature (1093)..(1093): n is a, c, g, or t
  misc_feature (1101)..(1101): n is a, c, g, or t
  misc_feature (1104)..(1104): n is a, c, g, or t
  misc_feature (1108)..(1108): n is a, c, g, or t
  misc_feature (1123)..(1123): n is a, c, g, or t
  misc_feature (1125)..(1125): n is a, c, g, or t
  misc_feature (1139)..(1139): n is a, c, g, or t
  misc_feature (1145)..(1145): n is a, c, g, or t
  misc_feature (1155)..(1155): n is a, c, g, or t
  misc_feature (1161)..(1161): n is a, c, g, or t
  misc_feature (1169)..(1169): n is a, c, g, or t
  misc_feature (1174)..(1174): n is a, c, g, or t
  misc_feature (1181)..(1181): n is a, c, g, or t
  misc_feature (1202)..(1202): n is a, c, g, or t
  misc_feature (1207)..(1207): n is a, c, g, or t
  misc_feature (1213)..(1213): n is a, c, g, or t
  misc_feature (1246)..(1246): n is a, c, g, or t
  misc_feature (1253)..(1254): n is a, c, g, or t
  misc_feature (1264)..(1264): n is a, c, g, or t
  misc_feature (1268)..(1268): n is a, c, g, or t
  misc_feature (1271)..(1271): n is a, c, g, or t
  misc_feature (1282)..(1284): n is a, c, g, or t
  misc_feature (1290)..(1290): n is a, c, g, or t
gctccgcactgtcggcggggtacgcatagccgggcactaggttcgtgggctgtggaggcgacggagcagggggccagtggggccagctcagggaggacctgcctggctttctcttgcataccctcgcttaggctggccggggtgtcacttctgcctccctgccctccagaccatggacggctccttcgtccagcacagtgtgagggttctgcaggagctcaacaagcagcgggagaagggccagtactgcgacgccactctggacgtggggggcctggtgtttaaggcacactggagtgtccttgcctgctgcagtcactttttccagagcctctacggggatggctcagggggcagtgtcgtcctccctgctggcttcgctgagatctttggcctcttgttggactttttctacactggtcacctcgctctcacctcagggaaccgggatcaggtgctcctggcagccagggagttgcgagtgccagaggccgtagagctgtgccagagcttcaagcccaaaacttcagtgggacaggcagcaggtggccagagtgggctggggccccctgcctcccagaatgtgaacagccacgtcaaggagccggcaggcttggaagaagaggaagtttcgaggactctgggtctagtccccagggatcaggagcccagaggcagtcatagtcctcagaggccccagctccattccccagctcagagtgagggcccctcctccctctgtgggaaactgaagcaggcnttgaagccttgtcccccttgaggacnagaaacccgaggactgcaaagtgccccccaanggccctaaaaagctgaaangtgcccaacntgcaaggccgcnatnaatgaatnggaaantggtggttcaagtgnaagaatnatggggaatggcgantanatgttntaaacctgaagcttgtgctgaaccagaaagaaatcaaatgnaatncnaaagccctgttgcaantaaaccanccctgaangncgggctccctaaaancttaaacctgttaaaaaaaaaaaagnaananngggngcccgtccaaagcccccaatntttaaaaanntccnccanaaaatttntcnaaancccaaacggaaaaancngggaaaaacctttnaaggcnaaagggaaangttatnttcgaaanaaacncctgaanaaacccgaattaaaaaccctnaaaanttcctnttttttccaaaaatcccaaaaaaacccgggcanggttccnnaagaaaaccnaaantcnccccccccttnnnaaaaantta

SEQ ID NO: 109 - DNA, 1105 bp, Homo sapiens
  misc_feature (841)..(841): n is a, c, g, or t
  misc_feature (844)..(844): n is a, c, g, or t
  misc_feature (859)..(859): n is a, c, g, or t
  misc_feature (905)..(905): n is a, c, g, or t
  misc_feature (913)..(913): n is a, c, g, or t
  misc_feature (924)..(925): n is a, c, g, or t
  misc_feature (929)..(929): n is a, c, g, or t
  misc_feature (931)..(931): n is a, c, g, or t
  misc_feature (946)..(946): n is a, c, g, or t
  misc_feature (967)..(967): n is a, c, g, or t
  misc_feature (971)..(971): n is a, c, g, or t
  misc_feature (977)..(978): n is a, c, g, or t
  misc_feature (992)..(993): n is a, c, g, or t
  misc_feature (995)..(995): n is a, c, g, or t
  misc_feature (998)..(998): n is a, c, g, or t
  misc_feature (1004)..(1004): n is a, c, g, or t
  misc_feature (1009)..(1009): n is a, c, g, or t
  misc_feature (1013)..(1013): n is a, c, g, or t
  misc_feature (1017)..(1017): n is a, c, g, or t
  misc_feature (1026)..(1026): n is a, c, g, or t
  misc_feature (1029)..(1029): n is a, c, g, or t
  misc_feature (1038)..(1038): n is a, c, g, or t
  misc_feature (1047)..(1047): n is a, c, g, or t
  misc_feature (1049)..(1049): n is a, c, g, or t
  misc_feature (1056)..(1056): n is a, c, g, or t
  misc_feature (1062)..(1062): n is a, c, g, or t
  misc_feature (1067)..(1068): n is a, c, g, or t
  misc_feature (1071)..(1071): n is a, c, g, or t
  misc_feature (1082)..(1082): n is a, c, g, or t
  misc_feature (1092)..(1092): n is a, c, g, or t
  misc_feature (1094)..(1094): n is a, c, g, or t
  misc_feature (1103)..(1103): n is a, c, g, or t
  misc_feature (1105)..(1105): n is a, c, g, or t
ggctcgggcggcgggaggagtggcagcggcaaggcagcccagtttcgcgaaggctgtcggcgcgccgcggcccgcaggcacccggcacgcgccttccccgcaggcacccggcacgcgccttccccgccgccacgatgcccaagaggaaggtcagctccgccgaaggcgccgccaaggaagagcccaagaggagatcggcgcggttgtcagctaaacctcctgcaaaagtggaagcgaagccgaaaaaggcagcagcgaaggataaatcttcagacaaaaaagtgcaaacaaaagggaaaaggggagcaaagggaaaacaggccgaagtggctaaccaagaaactaaagaagacttacctgcggaaaacggggaaacgaagactgaggagagtccagcctctgatgaagcaggagagaaagaagccaagtctgattaataaccatataccatgtcttatcagtggtccctgtctcccttcttgtacaatccagaggaatatttttatcaactattttgtaaatgcaagttttttagtagctctagaaacatttttaagaaggagggaatcccacctcatcccattttttaagtgtaaatgcttttttttaagaggtgaaatcatttgctggttgtttattttttggtacaaccagaaaatagtgtgggatattgaattatgggaggctctgactgtctcgggtgtcagcttaacattccacagatggggggttagtttttatatcctataatacaaagcatattaaatggcaatatggagtcagtcctgcatttaatgtcttgaacattttaaattacttctattaccatgttgttttttantanaattgtttcctaaanaaaaccactcttttgatcatggctctctctgccaaaattgtgtgcnctctgtancatctttggtnngggnantcctgttttcctaanaactttttttactgggctggnaaanattacnnatttgaacttgtanngnacntgcctnttgantttngaanttggggggnccntttttaacnccttaccancntgaaaantctggnacttnnaancccttttaagnaaaatttttntnccaattttnan

SEQ ID NO: 110 - DNA, 1127 bp, Homo sapiens
  misc_feature (849)..(849): n is a, c, g, or t
  misc_feature (872)..(872): n is a, c, g, or t
  misc_feature (902)..(902): n is a, c, g, or t
  misc_feature (911)..(911): n is a, c, g, or t
  misc_feature (915)..(916): n is a, c, g, or t
  misc_feature (923)..(923): n is a, c, g, or t
  misc_feature (933)..(933): n is a, c, g, or t
  misc_feature (938)..(938): n is a, c, g, or t
  misc_feature (946)..(946): n is a, c, g, or t
  misc_feature (962)..(962): n is a, c, g, or t
  misc_feature (973)..(973): n is a, c, g, or t
  misc_feature (976)..(977): n is a, c, g, or t
  misc_feature (979)..(979): n is a, c, g, or t
  misc_feature (983)..(983): n is a, c, g, or t
  misc_feature (989)..(989): n is a, c, g, or t
  misc_feature (994)..(995): n is a, c, g, or t
  misc_feature (1031)..(1032): n is a, c, g, or t
  misc_feature (1043)..(1043): n is a, c, g, or t
  misc_feature (1054)..(1054): n is a, c, g, or t
  misc_feature (1076)..(1076): n is a, c, g, or t
  misc_feature (1084)..(1084): n is a, c, g, or t
  misc_feature (1086)..(1086): n is a, c, g, or t
  misc_feature (1093)..(1093): n is a, c, g, or t
  misc_feature (1097)..(1097): n is a, c, g, or t
  misc_feature (1110)..(1110): n is a, c, g, or t
  misc_feature (1117)..(1117): n is a, c, g, or t
  misc_feature (1125)..(1127): n is a, c, g, or t
ggtggacgccgccgaagaagcatcgttaaagtctctcttcaccctgccgtcatgtctaagtcagagtctcctaaagagcccgaacagctgaggaagctcttcattggagggttgagctttgaaacaactgatgagagcctgaggagccattttgagcaatggggaacgctcacggactgtgtggtaatgagagatccaaacaccaagcgctccaggggctttgggtttgtcacatatgccactgtggaggaggtggatgcagctatgaatgcaaggccacacaaggtggatggaagagttgtggaaccaaagagagctgtctccagagaagattctcaaagaccaggtgcccacttaactgtgaaaaagatatttgttggtggcattaaagaagacactgaagaacatcacctaagagattattttgaacagtatggaaaaattgaagtgattgaaatcatgactgaccgaggcagtggcaagaaaaggggctttgcctttgtaacctttgacgaccatgactccgtggataagattgtcattcagaaataccatactgtgaatggccacaactgtgaagttagaaaagccctgtcaaagcaagagatggctagtgcttcatccagccaaagaggtcgaagtggttctggaaactttggtggtggtcgtggaggtggtttcggtgggaatgacaacttcggtcgtggaggaaacttcagtggtcgtggtggctttggtggcagccgtggtggtggtggatatggtggcagtggggatggcttataatggatttggtaatgatggaagcaattttggaggtgggggaagctacaatgattttggggaatnacaacaatcagtcttcaaatttnggaccctgaagggaggaaattttggagcanaactctggncccnntgggggnggaagccaanacttngcaaaccncgaaaccagggggctntggcggttccngcnncnccantacctntggcnnggcaaaaattttatttaggggggaaccggcacaatnnttacccccctnaaaaaaaaacncctctttccaattctggcaaangaaccccntnggaaacntttntcggaccccttanttctttncccgcccnnn

SEQ ID NO: 111 - DNA, 1129 bp, Homo sapiens
  misc_feature (779)..(779): n is a, c, g, or t
  misc_feature (812)..(812): n is a, c, g, or t
  misc_feature (834)..(834): n is a, c, g, or t
  misc_feature (843)..(843): n is a, c, g, or t
  misc_feature (853)..(853): n is a, c, g, or t
  misc_feature (860)..(860): n is a, c, g, or t
  misc_feature (866)..(866): n is a, c, g, or t
  misc_feature (874)..(874): n is a, c, g, or t
  misc_feature (880)..(880): n is a, c, g, or t
  misc_feature (892)..(892): n is a, c, g, or t
  misc_feature (897)..(897): n is a, c, g, or t
  misc_feature (908)..(908): n is a, c, g, or t
  misc_feature (923)..(923): n is a, c, g, or t
  misc_feature (937)..(937): n is a, c, g, or t
  misc_feature (976)..(976): n is a, c, g, or t
  misc_feature (989)..(989): n is a, c, g, or t
  misc_feature (998)..(998): n is a, c, g, or t
  misc_feature (1003)..(1003): n is a, c, g, or t
  misc_feature (1007)..(1007): n is a, c, g, or t
  misc_feature (1015)..(1015): n is a, c, g, or t
  misc_feature (1021)..(1021): n is a, c, g, or t
  misc_feature (1027)..(1027): n is a, c, g, or t
  misc_feature (1038)..(1038): n is a, c, g, or t
  misc_feature (1042)..(1042): n is a, c, g, or t
  misc_feature (1046)..(1046): n is a, c, g, or t
  misc_feature (1065)..(1065): n is a, c, g, or t
  misc_feature (1071)..(1071): n is a, c, g, or t
  misc_feature (1078)..(1078): n is a, c, g, or t
  misc_feature (1080)..(1080): n is a, c, g, or t
  misc_feature (1084)..(1085): n is a, c, g, or t
  misc_feature (1098)..(1098): n is a, c, g, or t
  misc_feature (1106)..(1106): n is a, c, g, or t
  misc_feature (1110)..(1111): n is a, c, g, or t
  misc_feature (1116)..(1116): n is a, c, g, or t
  misc_feature (1119)..(1119): n is a, c, g, or t
  misc_feature (1123)..(1124): n is a, c, g, or t
  misc_feature (1129)..(1129): n is a, c, g, or t
gccaagatcaacgcgagcaagaatcagcaggatgacggtaaaatgtttattggaggcttgagctgggatacaagcaaaaaagatctgacagagtacttgtctcgatttggggaagttgtagactgcacaattaaaacagatccagtcactgggagatcaagaggatttggatttgtgcttttcaaagatgctgctagtgttgataaggttttggaactgaaagaacacaaactggatggcaaattgatagatcccaaaagggccaaagctttaaaagggaaagaacctcccaaaaaggtttttgtgggtggattgagcccggatacttctgaagaacaaattaaagaatattttggagcctttggagagattgaaaatattgaacttcccatggatacaaaaacaaatgaaagaagaggattttgttttatcacatatactgatgaagagccagtaaaaaaattgttagaaagcagataccatcaaattggttctgggaagtgtgaaatcaaagttgcacaacccaaagaggtatataggcagcaacagcaacaacaaaaaggtggaagaggtgctgcagctggtggacgaggtggtacgaggggtcgtggccgaggtcagggccaaaactggaaccaaggatttaataactattatgatcaaggatatggaaattacaatagtgcctatggtggtgatcaaaactatagtggctatggcggatatgattatactgggtataactatgggaactatgggatatggacagggatatgcanactacagtggccaacagagcacttatggcaagncatctcgagggggtggcaatcnccaaaccanttaccagccntactaanggaaancattgganaaaacnggtgtgtataanatacnggaaaccgtanaaatgtctaatttantttaagatccatanaccaatgaacgtaaaaccaaatactaggtacccggtttnacaaaatggggantttttaatngcttnaganccggtttncccaangggccnaaaatctttancttnaagncctacccccctttttttanatggcnaaaaacntnaaanntttttctttttgntttttggncccnnggggnccnaaannaaaan

SEQ ID NO: 112 - DNA, 1130 bp, Homo sapiens
  misc_feature (834)..(834): n is a, c, g, or t
  misc_feature (836)..(836): n is a, c, g, or t
  misc_feature (843)..(843): n is a, c, g, or t
  misc_feature (846)..(846): n is a, c, g, or t
  misc_feature (862)..(862): n is a, c, g, or t
  misc_feature (867)..(867): n is a, c, g, or t
  misc_feature (877)..(877): n is a, c, g, or t
  misc_feature (884)..(884): n is a, c, g, or t
  misc_feature (894)..(894): n is a, c, g, or t
  misc_feature (899)..(899): n is a, c, g, or t
  misc_feature (902)..(902): n is a, c, g, or t
  misc_feature (908)..(908): n is a, c, g, or t
  misc_feature (922)..(922): n is a, c, g, or t
  misc_feature (947)..(947): n is a, c, g, or t
  misc_feature (977)..(977): n is a, c, g, or t
  misc_feature (1010)..(1010): n is a, c, g, or t
  misc_feature (1013)..(1013): n is a, c, g, or t
  misc_feature (1017)..(1017): n is a, c, g, or t
  misc_feature (1029)..(1029): n is a, c, g, or t
  misc_feature (1041)..(1041): n is a, c, g, or t
  misc_feature (1044)..(1044): n is a, c, g, or t
  misc_feature (1048)..(1048): n is a, c, g, or t
  misc_feature (1070)..(1070): n is a, c, g, or t
  misc_feature (1074)..(1074): n is a, c, g, or t
  misc_feature (1081)..(1081): n is a, c, g, or t
  misc_feature (1093)..(1093): n is a, c, g, or t
  misc_feature (1096)..(1097): n is a, c, g, or t
  misc_feature (1103)..(1104): n is a, c, g, or t
  misc_feature (1111)..(1113): n is a, c, g, or t
  misc_feature (1118)..(1118): n is a, c, g, or t
  misc_feature (1124)..(1124): n is a, c, g, or t
  misc_feature (1126)..(1126): n is a, c, g, or t
ggccaggaggtacattggcatcgtgaagcaggcaggcctggaaaggatgaggcctggtgcctacagcacaggctacgggggctacgaggagtacagtggcctcagtgatggctacggcttcaccaccgacctgttcgggagagacctcagctactgtctctccggaatgtatgaccacagatacggcgacagtgagttcacagtgcagagcaccacaggccactgtgtccacatgaggggcctgccgtacaaagcgaccgagaacgacatttacaacttcttctctcctctcaaccctgtgagagtccatattgagattggcccagatggaagagtgacgggtgaagcagatgttgagtttgctactcatgaagaagctgtggcagctatgtccaaagacagggccaatatgcagcacagatatatagaactcttcttgaattcaacaacaggggccagcaatggggcgtatagcagccaggtgatgcaaggcatgggggtgtctgctgcccaggccacttacagtggcctggagagccagtcagtgagtggctgttacggggccggctacagtgggcagaacagcatgggtggctatgactagttttgttaggaacatttgagttacttcaatcattttcacaggcagccaacaagcaattaagagcagttataatagaggaagctgggggacccattttgcaccatgagtttgtgaaaaaatctggattaaaaaattacctcttcagtgtttttctcatgcaaattttcttctagcatgtgataatgagtaaactaaactattttcagcttttctcaattaacattttgggnantatactncanagtgatgttatctaanttaantaatttaaantatgttnaatggggatnttttnacncccccntcccaagtgaaacnccctgggggaaacgtgctttttttnggaaaactccaaaggggctaacctccctgnattcaaaaaaaaaatttcccagggtttggttcnttncaantttaaattttcntttaaaaacccnttnaggntaaatttaaacctttttaaaantttnttttttnaaaatttgaaanccnnttttannacttgtnnnaaatnggggangncctt

SEQ ID NO: 113 - DNA, 923 bp, Homo sapiens
  misc_feature (597)..(597): n is a, c, g, or t
  misc_feature (621)..(621): n is a, c, g, or t
  misc_feature (626)..(626): n is a, c, g, or t
  misc_feature (639)..(639): n is a, c, g, or t
  misc_feature (657)..(657): n is a, c, g, or t
  misc_feature (660)..(660): n is a, c, g, or t
  misc_feature (666)..(666): n is a, c, g, or t
  misc_feature (676)..(676): n is a, c, g, or t
  misc_feature (687)..(687): n is a, c, g, or t
  misc_feature (700)..(700): n is a, c, g, or t
  misc_feature (703)..(703): n is a, c, g, or t
  misc_feature (708)..(708): n is a, c, g, or t
  misc_feature (727)..(727): n is a, c, g, or t
  misc_feature (733)..(733): n is a, c, g, or t
  misc_feature (744)..(744): n is a, c, g, or t
  misc_feature (746)..(746): n is a, c, g, or t
  misc_feature (758)..(758): n is a, c, g, or t
  misc_feature (761)..(761): n is a, c, g, or t
  misc_feature (775)..(775): n is a, c, g, or t
  misc_feature (778)..(778): n is a, c, g, or t
  misc_feature (781)..(781): n is a, c, g, or t
  misc_feature (787)..(787): n is a, c, g, or t
  misc_feature (791)..(791): n is a, c, g, or t
  misc_feature (795)..(795): n is a, c, g, or t
  misc_feature (810)..(810): n is a, c, g, or t
  misc_feature (812)..(812): n is a, c, g, or t
  misc_feature (818)..(818): n is a, c, g, or t
  misc_feature (821)..(821): n is a, c, g, or t
  misc_feature (825)..(825): n is a, c, g, or t
  misc_feature (830)..(830): n is a, c, g, or t
  misc_feature (836)..(836): n is a, c, g, or t
  misc_feature (845)..(845): n is a, c, g, or t
  misc_feature (848)..(848): n is a, c, g, or t
  misc_feature (875)..(875): n is a, c, g, or t
  misc_feature (889)..(890): n is a, c, g, or t
  misc_feature (900)..(900): n is a, c, g, or t
  misc_feature (907)..(907): n is a, c, g, or t
  misc_feature (909)..(909): n is a, c, g, or t
  misc_feature (913)..(913): n is a, c, g, or t
  misc_feature (915)..(915): n is a, c, g, or t
  misc_feature (920)..(920): n is a, c, g, or t
gcccacgcgtccgcggacgcgtgggcggacgcgtgggccagtatctctgattatgcggtgaagatcgtcaaagccaacaagttagaccacgtggtgaccatcatcaaggggaaggtggaggaggtggagctcccagtggagaaggtggacatcatcatcagcgagtggatgggctactgcctcttctacgagtccatgctcaacaccgtgctctatgcccgggacaagtggctggcgcccgatggcctcatcttcccagaccgggccacgctgtatgtgacggccatcgaggaccggcagtacaaagactacaagatccactggtgggagaacgtgtatggcttcgacatgtcttgcatcaaagatgtggccattaaggagcccctagtggatgtcgtggaccccaaacagctggtcaccaacgcctgcctcataaaggaggtggacatctataccgtcaaggtggaagacctgaccttcacctccccgttctgcctgcaagtgaagcggaatgactacgtgcacgccctggtggcctacttcaacatcgagttcacacgctgccacaagaggaccggcttctccaccagccccgantccccgtacacgcactggaagcanacggngttctacatggangactacctgaccgtgaanacnggcgangaaatcttcngcaccatcggnatgcggcccaacnccnaaaanaaccgggacctggaattcnccatcnacctggacttnanggccaactgtgnganctgttcctgctccnccnaanaaccgnatgngctnaaggccgggttttcncncccttnaanaaancccangggctnaaacgttcntanggggttttcgggggtccccctttcttntccctcccttcccnnaaaaaggggnttttaangncctngncctgnggg

SEQ ID NO: 114 - DNA, 910 bp, Homo sapiens
  misc_feature (631)..(631): n is a, c, g, or t
  misc_feature (711)..(711): n is a, c, g, or t
  misc_feature (751)..(751): n is a, c, g, or t
  misc_feature (758)..(758): n is a, c, g, or t
  misc_feature (769)..(769): n is a, c, g, or t
  misc_feature (776)..(776): n is a, c, g, or t
  misc_feature (801)..(801): n is a, c, g, or t
  misc_feature (820)..(820): n is a, c, g, or t
  misc_feature (828)..(828): n is a, c, g, or t
  misc_feature (832)..(832): n is a, c, g, or t
  misc_feature (836)..(836): n is a, c, g, or t
  misc_feature (841)..(841): n is a, c, g, or t
  misc_feature (844)..(845): n is a, c, g, or t
  misc_feature (850)..(850): n is a, c, g, or t
  misc_feature (855)..(855): n is a, c, g, or t
  misc_feature (864)..(864): n is a, c, g, or t
  misc_feature (867)..(867): n is a, c, g, or t
  misc_feature (876)..(876): n is a, c, g, or t
  misc_feature (878)..(878): n is a, c, g, or t
  misc_feature (888)..(888): n is a, c, g, or t
  misc_feature (890)..(890): n is a, c, g, or t
  misc_feature (893)..(893): n is a, c, g, or t
  misc_feature (898)..(898): n is a, c, g, or t
  misc_feature (906)..(906): n is a, c, g, or t
gcagtaaccctagaagacttatataatggtgcaacaagaaaactggctctgcaaaagaatgtgatttgtgacaaatgtgaaggtagaggaggtaagaaaggagcagtagagtgctgtcccaattgccgaggtactggaatgcaaataagaattcatcagataggacctggaatggttcagcaaattcagtctgtgtgcatggagtgccagggccatggggagcggatcagtcctaaagatagatgtaaaagctgcaacggaaggaagatagttcgagagaagaaaattttagaagttcatattgacaaaggcatgaaagatggccagaagataacattccatggtgaaggagaccaagaaccaggactggagccaggcgatattatcattgtgttagatcagaaggaccatgctgtttttactcgacgaggagaagaccttttcatgtgtatggacatacagctcgttgaagcactgtgtggcttccagaagccaatatctactcttgacaaccgaaccatcgtcatcacctctcatccaggtcagattgtcaagcatggagatatcaagtgtgtactaaatgaaggcatgccaatttatcgtagaccatatgaaaagggtcgcctaatcntcgaatttaaggtaaactttcctgagaatggctttctctctcctgataaactgtctttgctggaaaaactcctaccccanaggaaggaagtggaaaaaactgatgaaatggacccagtanaactggnggactttgatnccaatcnggaaagaccgcgcccctccatgganaagcctatgaggatgatgnacctcctncccnaagnggggntcnntgtcnaaccncttatgggnccnggaaaaacncnccctgctggncnttnttggngccctaangaat

SEQ ID NO: 115 - DNA, 1294 bp, Homo sapiens
  misc_feature (616)..(616): n is a, c, g, or t
  misc_feature (810)..(810): n is a, c, g, or t
  misc_feature (842)..(842): n is a, c, g, or t
  misc_feature (861)..(861): n is a, c, g, or t
  misc_feature (873)..(873): n is a, c, g, or t
  misc_feature (902)..(902): n is a, c, g, or t
  misc_feature (905)..(905): n is a, c, g, or t
  misc_feature (912)..(912): n is a, c, g, or t
  misc_feature (916)..(916): n is a, c, g, or t
  misc_feature (926)..(926): n is a, c, g, or t
  misc_feature (941)..(941): n is a, c, g, or t
  misc_feature (950)..(950): n is a, c, g, or t
  misc_feature (952)..(953): n is a, c, g, or t
  misc_feature (959)..(959): n is a, c, g, or t
  misc_feature (962)..(962): n is a, c, g, or t
  misc_feature (997)..(997): n is a, c, g, or t
  misc_feature (1001)..(1001): n is a, c, g, or t
  misc_feature (1013)..(1014): n is a, c, g, or t
  misc_feature (1048)..(1048): n is a, c, g, or t
  misc_feature (1050)..(1050): n is a, c, g, or t
  misc_feature (1056)..(1056): n is a, c, g, or t
  misc_feature (1073)..(1073): n is a, c, g, or t
  misc_feature (1102)..(1102): n is a, c, g, or t
  misc_feature (1104)..(1104): n is a, c, g, or t
  misc_feature (1110)..(1110): n is a, c, g, or t
  misc_feature (1113)..(1113): n is a, c, g, or t
  misc_feature (1115)..(1116): n is a, c, g, or t
  misc_feature (1119)..(1119): n is a, c, g, or t
  misc_feature (1138)..(1139): n is a, c, g, or t
  misc_feature (1145)..(1146): n is a, c, g, or t
  misc_feature (1156)..(1156): n is a, c, g, or t
  misc_feature (1164)..(1165): n is a, c, g, or t
  misc_feature (1169)..(1169): n is a, c, g, or t
  misc_feature (1172)..(1172): n is a, c, g, or t
  misc_feature (1183)..(1183): n is a, c, g, or t
  misc_feature (1188)..(1189): n is a, c, g, or t
  misc_feature (1202)..(1202): n is a, c, g, or t
  misc_feature (1207)..(1207): n is a, c, g, or t
  misc_feature (1211)..(1212): n is a, c, g, or t
  misc_feature (1223)..(1223): n is a, c, g, or t
  misc_feature (1236)..(1236): n is a, c, g, or t
  misc_feature (1238)..(1238): n is a, c, g, or t
  misc_feature (1242)..(1242): n is a, c, g, or t
  misc_feature (1246)..(1246): n is a, c, g, or t
  misc_feature (1255)..(1255): n is a, c, g, or t
  misc_feature (1257)..(1257): n is a, c, g, or t
  misc_feature (1262)..(1262): n is a, c, g, or t
  misc_feature (1270)..(1270): n is a, c, g, or t
  misc_feature (1272)..(1272): n is a, c, g, or t
  misc_feature (1285)..(1285): n is a, c, g, or t
ggctcttggattttttgtggcttctttcgttattggagccaggcctacaccccagcaaccatgtccaagggacctgcagttggtattgatcttggcaccacctactcttgtgtgggtgttttccagcacggaaaagtcgagataattgccaatgatcagggaaaccgaaccactccaagctatgtcgcctttacggacactgaacggttgatcggtgatgccgcaaagaatcaagttgcaatgaaccccaccaacacagtttttgatgccaaacgtctgattggacgcagatttgatgatgctgttgtccagtctgatatgaaacattggccctttatggtggtgaatgatgctggcaggcccaaggtccaagtagaatacaagggagagaccaaaagcttctatccagaggaggtgtcttctatggttctgacaaagatgaaggaaattgcagaagcctaccttgggaagactgttaccaatgctgtggtcacagtgccagcttactttaatgactctcagcgtcaggctaccaaagatgctggaactattgctggtctcaatgtacttagaattattaatgagccaactgctgctgctattgcttacggcttanacaaaaaggttggagcagaaagaaacgtgctcatctttgacctgggaggtggcacttttgatgtgtcaatcctcactattgaggatggaatctttgaggtcaagtctacagctggagacacccacttgggtggagaagattttgacaaccgaatggtcaaccattttattgctgagttaagcgcaagcataaanaaggacatcagtgagaacaagaaagctgtaanacgcctccgtactgcttgngaacgtgctaancgtaccctctcttccagcaccccaggccnagntattganatcnattccctctntgaaggaatcaactnctaaacctncnntacccnggncccaatttaaaaactgaatgctgaacctgttcccnggcnccctgaacccannaaaaaaagccccttcaaaagccaaacaaacaagncnaaaatnctggaaatttccgggtngggggtcacccaaccccaaatcaaaactncnccaaanctncnnctnggaaaaaatgaaaaaaaanncccccnnaaacttttcntagggccnntccnacncccctttctgnaaaannaaaagtcaaattnccccngaanncccccctcccngaaaaacccgggnanaatncccnaaaaaaacncntcaanaaaaaatncntttttaaacgggntttttttaa

SEQ ID NO: 116 - DNA, 1059 bp, Homo sapiens
  misc_feature (765)..(767): n is a, c, g, or t
  misc_feature (773)..(773): n is a, c, g, or t
  misc_feature (776)..(783): n is a, c, g, or t
  misc_feature (850)..(850): n is a, c, g, or t
  misc_feature (854)..(854): n is a, c, g, or t
  misc_feature (857)..(857): n is a, c, g, or t
  misc_feature (875)..(875): n is a, c, g, or t
  misc_feature (883)..(883): n is a, c, g, or t
  misc_feature (916)..(916): n is a, c, g, or t
  misc_feature (938)..(938): n is a, c, g, or t
  misc_feature (943)..(944): n is a, c, g, or t
  misc_feature (958)..(958): n is a, c, g, or t
  misc_feature (974)..(974): n is a, c, g, or t
  misc_feature (978)..(978): n is a, c, g, or t
  misc_feature (1008)..(1008): n is a, c, g, or t
  misc_feature (1010)..(1010): n is a, c, g, or t
  misc_feature (1016)..(1016): n is a, c, g, or t
  misc_feature (1023)..(1023): n is a, c, g, or t
  misc_feature (1027)..(1027): n is a, c, g, or t
  misc_feature (1032)..(1033): n is a, c, g, or t
  misc_feature (1046)..(1046): n is a, c, g, or t
  misc_feature (1049)..(1049): n is a, c, g, or t
  misc_feature (1057)..(1057): n is a, c, g, or t
ggtgtggctgtgccgttggtcctgtgcggtcacttagccaagatgcctgaggaaacccagacccaagaccaaccgatggaggaggaggaggttgagacgttcgcctttcaggcagaaattgcccagttgatgtcattgatcatcaatactttctactcgaacaaagagatctttctgagagagctcatttcaaattcatcagatgcattggacaaaatccggtatgaaagcttgacagatcccagtaaattagactctgggaaagagctgcatattaaccttataccgaacaaacaagatcgaactctcactattgtggatactggaattggaatgaccaaggctgacttgatcaataaccttggtactatcgccaagtctgggaccaaagcgttcatggaagctttgcaggctggtgcagatatctctatgattggccagttcggtgttggtttttattctgcttatttggttgctgagaaagtaactgtgatcaccaaacataacgatgatgagcagtacgcttgggagtcctcagcagggggatcattcacagtgaggacagacacaggtgaacctatgggtcgtggaacaaaagttatcctacacctgaaagaagaccaaactgagtacttggaggaacgaagaataaaggagattgtgaagaaacattctcagtttattggatatcccattactctttttgtggagaaggaacgtgataaagaagtaagcgatgatgaggctgaagaaaaggaagaccannnaaaaanaannnnnnnnaaaaaaagggcggccgctccctatagtgagtcgtattaagcttaattagctgagcttggactcctgntganaanatccagtaatgacctccnaaactccntctggatttgttcaaaaccctcggttgcccccnggcgttttttattgggggaaantccannctagcttgggcganattttccgggacctanggancctaaaatgggaaaaaaaatcccctggaanancccccngttgaanaatncccannggcctcctaaaanaanattttggngg

SEQ ID NO: 117 - DNA, 974 bp, Homo sapiens
  misc_feature (719)..(719): n is a, c, g, or t
  misc_feature (732)..(732): n is a, c, g, or t
  misc_feature (789)..(789): n is a, c, g, or t
  misc_feature (806)..(806): n is a, c, g, or t
  misc_feature (809)..(809): n is a, c, g, or t
  misc_feature (833)..(833): n is a, c, g, or t
  misc_feature (858)..(858): n is a, c, g, or t
  misc_feature (864)..(864): n is a, c, g, or t
  misc_feature (866)..(866): n is a, c, g, or t
  misc_feature (872)..(873): n is a, c, g, or t
  misc_feature (878)..(878): n is a, c, g, or t
  misc_feature (880)..(880): n is a, c, g, or t
  misc_feature (883)..(883): n is a, c, g, or t
  misc_feature (885)..(885): n is a, c, g, or t
  misc_feature (892)..(892): n is a, c, g, or t
  misc_feature (895)..(895): n is a, c, g, or t
  misc_feature (900)..(900): n is a, c, g, or t
  misc_feature (905)..(905): n is a, c, g, or t
  misc_feature (923)..(923): n is a, c, g, or t
  misc_feature (931)..(931): n is a, c, g, or t
  misc_feature (936)..(936): n is a, c, g, or t
  misc_feature (943)..(944): n is a, c, g, or t
  misc_feature (949)..(949): n is a, c, g, or t
  misc_feature (963)..(964): n is a, c, g, or t
  misc_feature (970)..(970): n is a, c, g, or t
ggaaagaaccagcttaaagatatggctattgctactggtggtgcagtgtttggagaagagggattgaccctgaatcttgaagacgttcagcctcatgacttaggaaaagttggagaggtcattgtgaccaaagacgatgccatgctcttaaaaggaaaaggtgacaaggctcaaattgaaaaacgtattcaagaaatcattgagcagttagatgtcacaactagtgaatatgaaaaggaaaaactgaatgaacggcttgcaaaactttcagatggagtggctgtgctgaaggttggtgggacaagtgatgttgaagtgaatgaaaagaaagacagagttacagatgcccttaatgctacaagagctgctgttgaagaaggcattgttttgggagggggttgtgccctccttcgatgcattccagccttggactcattgactccagctaatgaagatcaaaaaattggtatagaaattattaaaagaacactcaaaattccagcaatgaccattgctaagaatgcaggtgttgaaggatctttgatagttgagaaaattatgcaaagttcctcagaagttggttatgatgctatggctggagattttgtgaatatggtggaaaaaggaatcattgacccaacaaaggttgtgagaactgctttattggatgctgctggtgtggcctctctgttaactacagcagaagtttgtagtcacanaaattccctaaanaagaaaaaggacccctggaatgggtgcaatgggtggaatgggaagtgttatgggaangtggcatgttctaactnccnagacctaatgcttttaccctttantaatgaaactgtgacaggaaccccnaggcantngttccnnccccnantancntccaaanaanttcanttggnaaaaaatgaaaaaaaaangctggctnaaaantccctannaaccntccagtttactggnnttccgnttga

SEQ ID NO: 118 - DNA, 883 bp, Homo sapiens
gctcaggagcttgatccagacctctacaagcaaatggagaagttcaggaaggtacaaacacaagtgcgccttgcaaaaaaaaactttgacaaattgaagatggatgtttgtcaaaaagtggatcttcttggagcgagcagatgcaatctcttgtctcacatgctagcaacataccagaccactctgcttcatttttgggagaaaacttctcacactatggcagccatccatgagagtttcaaaggttatcaaccatatgaatttactactttaaagagcttacaagaccctatgaaaaaattagttgagaaagaagagaagaagaaaatcaaccagcaggaaagtacagatgcagccgtgcaggagccgagccaattaatttcattagaggaagaaaaccagcgcaaggaatcctctagttttaagactgaagatggaaaaagtattttatctgccttagacaaaggctctacacatactgcatgctcaggacccatagatgaactattagacatgaaatctgaggaaggtgcttgcctgggaccagtggcagggaccccggaacctgaaggtgctgacaaagatgacctgctgctgttgagtgagatcttcaatgcttcctccttggaagagggcgagttcagcaaagagtgggccgctgtgtttggagacggccaagtgaaggagccagtgcccactatggccctgggagagccagaccccaaaggcccagacaggctcaggtttccttccttcgcagcttttagaccaaaatatgaaagacttacaggcctcgctacaagaacctgctaaggctgcctcagacctgactgcctggttcagcctcttcgctgacctcgaccccactctcaatcctgatgct

SEQ ID NO: 119 - DNA, 1013 bp, Homo sapiens
  misc_feature (658)..(658): n is a, c, g, or t
  misc_feature (703)..(703): n is a, c, g, or t
  misc_feature (733)..(733): n is a, c, g, or t
  misc_feature (736)..(736): n is a, c, g, or t
  misc_feature (738)..(738): n is a, c, g, or t
  misc_feature (772)..(772): n is a, c, g, or t
  misc_feature (802)..(802): n is a, c, g, or t
  misc_feature (809)..(809): n is a, c, g, or t
  misc_feature (818)..(818): n is a, c, g, or t
  misc_feature (833)..(833): n is a, c, g, or t
  misc_feature (855)..(855): n is a, c, g, or t
  misc_feature (863)..(863): n is a, c, g, or t
  misc_feature (866)..(866): n is a, c, g, or t
  misc_feature (875)..(875): n is a, c, g, or t
  misc_feature (877)..(877): n is a, c, g, or t
  misc_feature (880)..(880): n is a, c, g, or t
  misc_feature (883)..(883): n is a, c, g, or t
  misc_feature (894)..(894): n is a, c, g, or t
  misc_feature (896)..(896): n is a, c, g, or t
  misc_feature (923)..(923): n is a, c, g, or t
  misc_feature (926)..(927): n is a, c, g, or t
  misc_feature (942)..(944): n is a, c, g, or t
  misc_feature (951)..(952): n is a, c, g, or t
  misc_feature (955)..(955): n is a, c, g, or t
  misc_feature (957)..(957): n is a, c, g, or t
  misc_feature (961)..(961): n is a, c, g, or t
  misc_feature (964)..(964): n is a, c, g, or t
  misc_feature (973)..(973): n is a, c, g, or t
  misc_feature (987)..(987): n is a, c, g, or t
  misc_feature (991)..(991): n is a, c, g, or t
ggggaggagcggcgcgcgctcggacctctcccgccctgctcgttcgctctccagcttgggatggccggctacctgcgggtcgtgcgctcgctctgcagagcctcaggctcgcggccggcctgggcgccggcggccctgacagcccccacctcgcaagagcagccgcggcgccactatgccgacaaaaggatcaaggtggcgaagcccgtggtggagatggatggtgatgagatgacccgtattatctggcagttcatcaaggagaagctcatcctgccccacgtggacatccagctaaagtattttgacctcgggctcccaaaccgtgaccagactgatgaccaggtcaccattgactctgcactggccacccagaagtacagtgtggctgtcaagtgtgccaccatcacccctgatgaggcccgtgtggaagagttcaagctgaagaagatgtggaaaagtcccaatggaactatccggaacatcctgggggggactgtcttccgggagcccatcatctgcaaaaacatcccacgcctagtccctggctggaccaagcccatcaccattggcaggcacgcccatggcgaccagtacaaggccacagactttgtggcagaccgggccggcactttcaaaatggtcttcaccccaaaanatggcagtggtgtcaaggagtgggaagtgtacaacttccccgcangcggcgtgggcatgggcatgtacaacaccnacnantccatctcaagtttttgcgcacagctgcttcaantatgccatccaaaaaaaatggccgctgtanatgaacncccaaaaanaccatactgaaagcntacaatgggcgttttcaagganatttttcnagnaaatttttnanaancantattaaaaccnantttccaaaaaaaaaaaaatttggtatnaanncccggctccattgannnaaatggnnggntnaggnccntaaattttncggggggttttttntggncctgcaaaaattttaaggaaat

SEQ ID NO: 120 - DNA, 1091 bp, Homo sapiens
  misc_feature (813)..(813): n is a, c, g, or t
  misc_feature (834)..(834): n is a, c, g, or t
  misc_feature (836)..(836): n is a, c, g, or t
  misc_feature (848)..(848): n is a, c, g, or t
  misc_feature (867)..(867): n is a, c, g, or t
  misc_feature (894)..(894): n is a, c, g, or t
  misc_feature (896)..(896): n is a, c, g, or t
  misc_feature (913)..(913): n is a, c, g, or t
  misc_feature (916)..(916): n is a, c, g, or t
  misc_feature (925)..(926): n is a, c, g, or t
  misc_feature (940)..(940): n is a, c, g, or t
  misc_feature (944)..(944): n is a, c, g, or t
  misc_feature (961)..(961): n is a, c, g, or t
  misc_feature (968)..(968): n is a, c, g, or t
  misc_feature (978)..(978): n is a, c, g, or t
  misc_feature (995)..(995): n is a, c, g, or t
  misc_feature (997)..(997): n is a, c, g, or t
  misc_feature (1005)..(1005): n is a, c, g, or t
  misc_feature (1011)..(1011): n is a, c, g, or t
  misc_feature (1021)..(1021): n is a, c, g, or t
  misc_feature (1043)..(1043): n is a, c, g, or t
  misc_feature (1046)..(1047): n is a, c, g, or t
  misc_feature (1059)..(1059): n is a, c, g, or t
  misc_feature (1069)..(1069): n is a, c, g, or t
  misc_feature (1071)..(1071): n is a, c, g, or t
  misc_feature (1081)..(1081): n is a, c, g, or t
  misc_feature (1083)..(1083): n is a, c, g, or t
gctgcgggaaacatggcggcattgagcggagtccgctggctgacccgagcgctggtctccgccgggaaccctggggcatggagaggtctgagtacctcggccgcggcgcacgctgcatcgcggagccaggccgaggacgtgagggtggagggctcctttcccgtgaccatgcttccgggagacggtgtggggcctgagctgatgcacgccgtcaaggaggtgttcaaggctgccgctgtcccagtggagttccaggagcaccacctgagtgaggtgcagaatatggcatctgaggagaagctggagcaggtgctgagttccatgaaggagaacaaagtggccatcattggaaagattcataccccgatggagtataagggggagctagcctcctatgatatgcggctgaggcgtaagttggacttatttgccaacgtagtccatgtgaagtcacttcctgggtatatgactcggcacaacaatctagacctggtgatcattcgagagcagacagaaggggagtacagctctctggaacatgagagtgcaaggggtgtgattgagtgtttgaagattgtcacacgagccaagtctcagcggattgcaaagttcgcctttgactatgccaccaagaaggggcggggcaaggtcactgctgtccacaaggccaacatcatgaaacttggggatgggttgttcctgcagtgctgtgaggaagttgctgaactgtaccccaaaatcaaatttgagacaatgatcatagacaactgctgcatgcagctggtgcagaatccttaccagtttgatgtgctngtgatgcccaatctctatggnancattattgacantctggctgctggcctggtngggggaactggtgtggtccctggtgananctatagtgcaaaatacncantctttgaannggtgcccggcaccntttncccagccagtgggcagnaatatanccaatcccanggcatgctgctgtcggntncaaaatgntggggnatctaatttngaaatcccccccccatgatccnaanncggggaaaaagntatcaaattngnaaggggggantnaaaaatgg

SEQ ID NO: 121 - DNA, 788 bp, Homo sapiens
ggccgctgccaccgcaccccgccatggagcggccgtcgctgcgcgccctgctcctcggcgccgctgggctgctgctcctgctcctgcccctctcctcttcctcctcttcggacacctgcggcccctgcgagccggcctcctgcccgcccctgcccccgctgggctgcctgctgggcgagacccgcgacgcgtgcggctgctgccctatgtgcgcccgcggcgagggcgagccgtgcgggggtggcggcgccggcagggggtactgcgcgccgggcatggagtgcgtgaagagccgcaagaggcggaagggtaaagccggggcagcagccggcggtccgggtgtaagcggcgtgtgcgtgtgcaagagccgctacccggtgtgcggcagcgacggcaccacctacccgagcggctgccagctgcgcgccgccagccagagggccgagagccgcggggagaaggccatcacccaggtcagcaagggcacctgcgagcaaggtccttccatagtgacgccccccaaggacatctggaatgtcactggtgcccaggtgtacttgagctgtgaggtcatcggaatcccgacacctgtcctcatctggaacaaggtaaaaaggggtcactatggagttcaaaggacagaactcctgcctggtgaccgggacaacctggccattcagacccggggtggcccagaaaagcatgaagtaactggctgggtgctggtatctcctctaagtaaggaagatgctggagaatatgagtgccatgcatccaattcccaagga

SEQ ID NO: 122 - DNA, 925 bp, Homo sapiens
  misc_feature (739)..(739): n is a, c, g, or t
  misc_feature (829)..(829): n is a, c, g, or t
  misc_feature (882)..(882): n is a, c, g, or t
gcccacgcgtccgctcctgaggctgacatgaatatttttgaagacattggggattacgtaccctccacaaccaagacacctcgggacaaggagcgggagagatatcgggaacgggagcgtgatcgggaaagagacagagaccgtgaccgagagcgagagcgagaacgagatcgggaacgagagcgagagcgggaccgagagagagaagaggaaaagaagagacacagctactttgagaagccaaaagtagatgatgagcccatggacgttgacaaaggacctgggtctaccaaggagttgatcaagtccatcaatgaaaagtttgctgggtctgctggctgggaaggcacagaatcgttgaagaagccagaagacaaaaagcagctgggagatttctttggcatgtccaacagttatgcagagtgctacccagccacgatggatgacatggctgtggatagtgatgaggaggtggattatagcaaaatggaccagggtaacaagaaggggcccttaggccgttgggactttgatacccaggaagaatacagcgagtatatgaacaacaaagaagctttgcccaaggctgcattccagtatggtatcaaaatgtctgaagggcggaaaaccaggcgcttcaaggaaaccaatgacaaagcagagcttgatcgccagtggaagaagattagtgcaatcattgagaagaggaagaagatggaagctgatggggttgaagtcnaaagaccaaaatactaatcactagttacaacccagagatgctccacaagggatatgctcccccacggtttttcttttctacaattttccnaaaggttgccaagatgtttttttttgtggatgaaatataaaatttttattggngtaattaccttgggttccccattaaaattgggttaccttgcct

SEQ ID NO: 123 - DNA, 1085 bp, Homo sapiens
  misc_feature (827)..(827): n is a, c, g, or t
  misc_feature (838)..(838): n is a, c, g, or t
  misc_feature (891)..(891): n is a, c, g, or t
  misc_feature (896)..(896): n is a, c, g, or t
  misc_feature (918)..(919): n is a, c, g, or t
  misc_feature (934)..(934): n is a, c, g, or t
  misc_feature (951)..(951): n is a, c, g, or t
  misc_feature (957)..(957): n is a, c, g, or t
  misc_feature (966)..(966): n is a, c, g, or t
  misc_feature (969)..(969): n is a, c, g, or t
  misc_feature (983)..(983): n is a, c, g, or t
  misc_feature (995)..(995): n is a, c, g, or t
  misc_feature (998)..(998): n is a, c, g, or t
  misc_feature (1003)..(1004): n is a, c, g, or t
  misc_feature (1010)..(1011): n is a, c, g, or t
  misc_feature (1019)..(1020): n is a, c, g, or t
  misc_feature (1034)..(1034): n is a, c, g, or t
  misc_feature (1039)..(1039): n is a, c, g, or t
  misc_feature (1045)..(1045): n is a, c, g, or t
  misc_feature (1055)..(1056): n is a, c, g, or t
  misc_feature (1067)..(1067): n is a, c, g, or t
  misc_feature (1069)..(1069): n is a, c, g, or t
  misc_feature (1071)..(1072): n is a, c, g, or t
  misc_feature (1078)..(1078): n is a, c, g, or t
  misc_feature (1082)..(1082): n is a, c, g, or t
ggcgcggtcctcggagacacgcggcggtgtcctgtgttggccatggccgactacctgattagtgggggcacgtcctacgtgccagacgacggactcacagcacagcagctcttcaactgcggagacggcctcacctacaatgactttctcattctccctgggtacatcgacttcactgcagaccaggtggacctgacttctgctctgaccaagaaaatcactcttaagaccccactggtttcctctcccatggacacagtcacagaggctgggatggccatagcaatggcgcttacaggcggtattggcttcatccaccacaactgtacacctgaattccaggccaatgaagttcggaaagtgaagaaatatgaacagggattcatcacagaccctgtggtcctcagccccaaggatcgcgtgcgggatgtttttgaggccaaggcccggcatggtttctgcggtatcccaatcacagacacaggccggatggggagccgcttggtgggcatcatctcctccagggacattgattttctcaaagaggaggaacatgactgtttcttggaagagataatgacaaagagggaagacttggtggtagcccctgcaggcatcacactgaaggaggcaaatgaaattctgcagcgcagcaagaagggaaagttgcccattgtaaatgaagatgatgagcttgtggccatcattgcccggacagacctgaagaagaatcgggactacccactagcctccaaagatgccaagaaacagctgctgtgtggggcagccattggcactcatgaggatgacaagtataggctggactngctcgcccagnctggtgtggatgtaatggttttggactcttcccagggaaattccatcttccanatcantatgatcaagtacatccaaaannaataccctaatctcnagtcattggaggcatgngggtcnctgctgccnagnccaaaaacctcatngatgcagggtgnatncctgnnggtggnntgggaaanngctcctctgcatanccaanaaaggntggcctgggnngccccaacaananannttaaangggncaa

SEQ ID NO: 124 - DNA, 1027 bp, Homo sapiens
  misc_feature (798)..(798): n is a, c, g, or t
  misc_feature (801)..(801): n is a, c, g, or t
  misc_feature (816)..(816): n is a, c, g, or t
  misc_feature (820)..(820): n is a, c, g, or t
  misc_feature (848)..(848): n is a, c, g, or t
  misc_feature (856)..(856): n is a, c, g, or t
  misc_feature (859)..(859): n is a, c, g, or t
  misc_feature (865)..(865): n is a, c, g, or t
  misc_feature (870)..(870): n is a, c, g, or t
  misc_feature (886)..(886): n is a, c, g, or t
  misc_feature (891)..(891): n is a, c, g, or t
  misc_feature (940)..(940): n is a, c, g, or t
  misc_feature (948)..(948): n is a, c, g, or t
  misc_feature (951)..(952): n is a, c, g, or t
  misc_feature (958)..(958): n is a, c, g, or t
  misc_feature (962)..(962): n is a, c, g, or t
  misc_feature (966)..(966): n is a, c, g, or t
  misc_feature (968)..(968): n is a, c, g, or t
  misc_feature (977)..(977): n is a, c, g, or t
  misc_feature (987)..(988): n is a, c, g, or t
  misc_feature (990)..(990): n is a, c, g, or t
  misc_feature (993)..(993): n is a, c, g, or t
  misc_feature (1014)..(1015): n is a, c, g, or t
  misc_feature (1023)..(1025): n is a, c, g, or t
gccgcttccgtccccaggcaccactgccccgaggcccagcagcatccctgcacccgccgaggccgaggcctggagcccccggaagttgccatcctcagcctccaccttcctctccccaggctcccagacccattcagggcctgagctcggcctggttccaagccctgcttccctgtggcctccaccgccatctccagccccttcttctaccaagccaggcccagagagctcagtgtccctcctgcagggagcccgcccctctccgttttgctggcccctctgtgagatttcccggggcacccacaacttctcggaggagctcaagatcggggagggtggctttgggtgcgtgtaccgggcggtgatgaggaacacggtgtatgctgtgaagaggctgaaggagaacgctgacctggagtggactgcagtgaagcagagcttcctgaccgaggtggagcagctgtccaggtttcgtcacccaaacattgtggactttgctggctactgtgctcagaacggcttctactgcctggtgtacggcttcctgcccaacggctccctggaggaccgtctccactgccagacccaggcctgcccacctctctcctggcctcagcgactggacatccttctgggtacagcccgggcaattcagtttctacatcaggacagccccagcctcatccatggagacatcaagagttccaacgtccttctggatgaaaggctgacacccaagctgggagactttggcctggcccggttcagccgctttgccgggtccagccccagccagancancatggtggcccgganacanacagtgcggggcaccctggcctacttgnccgaagantanatcaanacggnaaggtggctgtggaancgganaccttcactttggggtggaatgctaaaaacttggctggtcaaaggctgnaaaaccanggnnccagancaantatntnaaaaactgntgaaaaaaanntnaanaagctgaatggttttaaaaannccaaaaannntg

SEQ ID NO: 125 - DNA, 1083 bp, Homo sapiens
  misc_feature (711)..(711): n is a, c, g, or t
  misc_feature (726)..(726): n is a, c, g, or t
  misc_feature (742)..(742): n is a, c, g, or t
  misc_feature (749)..(749): n is a, c, g, or t
  misc_feature (758)..(758): n is a, c, g, or t
  misc_feature (797)..(797): n is a, c, g, or t
  misc_feature (809)..(809): n is a, c, g, or t
  misc_feature (823)..(823): n is a, c, g, or t
  misc_feature (861)..(861): n is a, c, g, or t
  misc_feature (894)..(894): n is a, c, g, or t
  misc_feature (898)..(898): n is a, c, g, or t
  misc_feature (925)..(925): n is a, c, g, or t
  misc_feature (944)..(944): n is a, c, g, or t
  misc_feature (947)..(947): n is a, c, g, or t
  misc_feature (963)..(963): n is a, c, g, or t
  misc_feature (965)..(965): n is a, c, g, or t
  misc_feature (974)..(974): n is a, c, g, or t
  misc_feature (990)..(990): n is a, c, g, or t
  misc_feature (994)..(994): n is a, c, g, or t
  misc_feature (1001)..(1001): n is a, c, g, or t
  misc_feature (1012)..(1012): n is a, c, g, or t
  misc_feature (1021)..(1023): n is a, c, g, or t
  misc_feature (1025)..(1026): n is a, c, g, or t
  misc_feature (1045)..(1045): n is a, c, g, or t
  misc_feature (1052)..(1052): n is a, c, g, or t
  misc_feature (1056)..(1058): n is a, c, g, or t
  misc_feature (1060)..(1061): n is a, c, g, or t
  misc_feature (1065)..(1065): n is a, c, g, or t
  misc_feature (1067)..(1067): n is a, c, g, or t
  misc_feature (1071)..(1071): n is a, c, g, or t
gcccacgcgtccgcccacgcgtccgagctggggaaccccatgaagagaggtgcccaggtcaccttctacctcatccttagcacctccgggatcagcattgagaccacggaactggaggtagagctgctgttggccacgatcagtgagcaggagctgcatccagtctctgcacgagcccgtgtcttcattgagctgccactgtccattgcaggaatggccattccccagcaactcttcttctctggtgtggtgaggggcgagagagccatgcagtctgagcgggatgtgggcagcaaggtcaagtatgaggtcacggtttccaaccaaggccagtcgctcagaaccctgggctctgccttcctcaacatcatgtggcctcatgagattgccaatgggaagtggttgctgtacccaatgcaggttgagctggagggcgggcaggggcctgggcagaaagggctttgctctcccaggcccaacatcctccacctggatgtggacagtagggataggaggcggcgggagctggagccacctgagcagcaggagcctggtgagcggcaggagcccagcatgtcctggtggccagtgtcctctgctgagaagaagaaaaacatcaccctggactgcgcccggggcacggccaactgtgtggtgttcagctgcccactctacagctttgaccgcgcggctgtgctgcatgtctggggnccgtctctggaacancacctttctggaggantactcanctgtgaaantccctggaagtgattgtccgggccaacatcacagtgaantcctccataaanaacttgatgctccnagatgcctccacagtgatcccagtgatggtatacttgnaacccatggctgtgggggccaaaaagaatgccntggngggtcatcctcctggctgtactggctngggctgctggggctaacantgntggggctgcctcctgngnaaaaatggnatttttcaaacgggcnaaanccccccnaaggcccccgngcccccaannncnngggggggaaaaattccccnggaaaanccannncnntttnangggngaaaaaaaaggg

SEQ ID NO: 126 - DNA, 1081 bp, Homo sapiens
  misc_feature (676)..(676): n is a, c, g, or t
  misc_feature (775)..(775): n is a, c, g, or t
  misc_feature (787)..(787): n is a, c, g, or t
  misc_feature (798)..(798): n is a, c, g, or t
  misc_feature (810)..(810): n is a, c, g, or t
  misc_feature (813)..(813): n is a, c, g, or t
  misc_feature (829)..(829): n is a, c, g, or t
  misc_feature (848)..(848): n is a, c, g, or t
  misc_feature (866)..(866): n is a, c, g, or t
  misc_feature (886)..(886): n is a, c, g, or t
  misc_feature (888)..(888): n is a, c, g, or t
  misc_feature (925)..(925): n is a, c, g, or t
  misc_feature (945)..(946): n is a, c, g, or t
  misc_feature (960)..(960): n is a, c, g, or t
  misc_feature (965)..(965): n is a, c, g, or t
  misc_feature (980)..(980): n is a, c, g, or t
  misc_feature (988)..(988): n is a, c, g, or t
  misc_feature (995)..(995): n is a, c, g, or t
  misc_feature (1005)..(1005): n is a, c, g, or t
  misc_feature (1007)..(1007): n is a, c, g, or t
  misc_feature (1009)..(1009): n is a, c, g, or t
  misc_feature (1024)..(1024): n is a, c, g, or t
  misc_feature (1033)..(1034): n is a, c, g, or t
  misc_feature (1046)..(1047): n is a, c, g, or t
  misc_feature (1058)..(1058): n is a, c, g, or t
  misc_feature (1060)..(1060): n is a, c, g, or t
  misc_feature (1062)..(1064): n is a, c, g, or t
  misc_feature (1066)..(1081): n is a, c, g, or t
gcggacgcgtgggttttctgtcactggacgccaaggagttttcggtggctcagctgggtaaccggggatcaccatggcggcctcattggtggggaagaagatcgtgtttgtaacggggaacgccaagaagctggaggaggtcgttcagattctaggagataagtttccatgcactttggtggcacagaaaattgacctgccggagtaccagggggagccggatgagatttccatacagaaatgtcaggaggcagttcgccaggtacaggggcccgtgctggttgaggacacttgtctgtgcttcaatgcccttggagggctccccggcccctacataaagtggtttctggagaagttaaagcctgaaggtctccaccagctcctggccgggttcgaggacaagtcagcctatgcgctctgcacgtttgcactcagcaccggggacccaagccagcccgtgcgcctgttcaggggccggacctcgggccggatcgtggcacccagaggctgccaggactttggctgggacccctgctttcagcctgatggatatgagcagacgtacgcagagatgcctaaggcggagaagaacgctgtctcccatcgcttccgggccctgctggagctgcaggagtactttggcagtttggcagcttgacttctgcagctggaggangcccctcaggccggggatctggggagggctagcccaaaacctcccgcatcgggcaggcaccccctgaagtacttccttcagggtttccccctttgtganggtgtcgagtancctcaccggcntgtctggaagancanctggctctgctctganaaactctggcaagtggacnccattctcttgcccttangattcactgctctctcctananccgccaggcctggggtcctgaaaggaccctgggtggnaaaactgtacttggtggaannaaggccttgggaanaaacntgcaaatcccctccntggttttnaatgcanaaaaaaattncngnaaaaaattgtttccnaaaaaaccnncttatttgtttnnaaaaaaaaaananannnannnnnnnnnnnnnnnn

SEQ ID NO: 127 - DNA, 999 bp, Homo sapiens
  misc_feature (637)..(637): n is a, c, g, or t
  misc_feature (800)..(800): n is a, c, g, or t
  misc_feature (807)..(807): n is a, c, g, or t
  misc_feature (818)..(818): n is a, c, g, or t
  misc_feature (827)..(827): n is a, c, g, or t
  misc_feature (847)..(847): n is a, c, g, or t
  misc_feature (870)..(870): n is a, c, g, or t
  misc_feature (874)..(874): n is a, c, g, or t
  misc_feature (876)..(876): n is a, c, g, or t
  misc_feature (884)..(884): n is a, c, g, or t
  misc_feature (907)..(908): n is a, c, g, or t
  misc_feature (911)..(911): n is a, c, g, or t
  misc_feature (915)..(915): n is a, c, g, or t
  misc_feature (917)..(917): n is a, c, g, or t
  misc_feature (938)..(938): n is a, c, g, or t
  misc_feature (942)..(942): n is a, c, g, or t
  misc_feature (948)..(948): n is a, c, g, or t
  misc_feature (958)..(958): n is a, c, g, or t
  misc_feature (964)..(964): n is a, c, g, or t
  misc_feature (966)..(966): n is a, c, g, or t
  misc_feature (974)..(974): n is a, c, g, or t
  misc_feature (985)..(985): n is a, c, g, or t
  misc_feature (987)..(988): n is a, c, g, or t
  misc_feature (990)..(990): n is a, c, g, or t
  misc_feature (993)..(993): n is a, c, g, or t
  misc_feature (999)..(999): n is a, c, g, or t
ggtgaccaaggcggccatgattgtgaaccagctgtcgaagaaggaggcgtcgcggcgggccctgatgggctcgccccagctggtggccgctgtcgtgcgtaccatgcagaataccagcgacctggacacagcccgctgcaccaccagcatcctgcacaacctctcccaccaccgggaggggctgctcgccatcttcaagtcgggtggcatccctgctctggtccgcatgctcagctcccctgtggagtcggtcctgttctatgccatcaccacgctgcacaacctgctcctgtaccaggagggcgccaagatggccgtgcgcctggccgacgggctgcaaaagatggtgcccctgctcaacaagaacaaccccaagttcctggccatcaccaccgactgcctgcagctcctggcctacggcaaccaggagagcaagctgatcatcctggccaatggtgggccccaggccctcgtgcagatcatgcgtaactacagttatgaaaagctgctctggaccaccagtcgtgtgctcaaggtgctatccgtgtgtcccagcaataagcctgccattgtggaggctggtgggatgcaggccctgggcaagcacctgaccagcaacagcccccgcctggtgcanaactgcctgtggaccctgcgcaacctctcagatgtggccaccaagcaggagggcctggagagtgtgctgaaaattctggtgaatcagctgagtgtggatgacgtcaacgtccctcacctgtgccacgggcacactctccaacctgacatgcaacaacagcaanaacaaanacgctggtganacaaaaaancggtgtggaggctcttatcnatgccatcctgcgtggtggtganaagnanaaattcanggaacctgccgtttgcgctttgnnccncttnantaaccgccaaccttgaggccnaaantggccnaaaaattttntgcgtntnaatttggnattccaacccntnngnaantttttn

SEQ ID NO: 128 - DNA, 1221 bp, Homo sapiens
  misc_feature (728)..(728): n is a, c, g, or t
  misc_feature (730)..(730): n is a, c, g, or t
  misc_feature (773)..(773): n is a, c, g, or t
  misc_feature (822)..(822): n is a, c, g, or t
  misc_feature (839)..(839): n is a, c, g, or t
  misc_feature (869)..(869): n is a, c, g, or t
  misc_feature (880)..(880): n is a, c, g, or t
  misc_feature (883)..(883): n is a, c, g, or t
  misc_feature (915)..(915): n is a, c, g, or t
  misc_feature (942)..(942): n is a, c, g, or t
  misc_feature (949)..(949): n is a, c, g, or t
  misc_feature (956)..(956): n is a, c, g, or t
  misc_feature (958)..(959): n is a, c, g, or t
  misc_feature (985)..(985): n is a, c, g, or t
  misc_feature (991)..(991): n is a, c, g, or t
  misc_feature (997)..(998): n is a, c, g, or t
  misc_feature (1003)..(1003): n is a, c, g, or t
  misc_feature (1008)..(1009): n is a, c, g, or t
  misc_feature (1012)..(1012): n is a, c, g, or t
  misc_feature (1017)..(1018): n is a, c, g, or t
  misc_feature (1028)..(1028): n is a, c, g, or t
  misc_feature (1047)..(1047): n is a, c, g, or t
  misc_feature (1050)..(1050): n is a, c, g, or t
  misc_feature (1064)..(1064): n is a, c, g, or t
  misc_feature (1072)..(1072): n is a, c, g, or t
  misc_feature (1075)..(1075): n is a, c, g, or t
  misc_feature (1084)..(1084): n is a, c, g, or t
  misc_feature (1086)..(1087): n is a, c, g, or t
  misc_feature (1105)..(1105): n is a, c, g, or t
  misc_feature (1108)..(1108): n is a, c, g, or t
  misc_feature (1113)..(1113): n is a, c, g, or t
  misc_feature (1133)..(1134): n is a, c, g, or t
  misc_feature (1144)..(1144): n is a, c, g, or t
  misc_feature (1149)..(1149): n is a, c, g, or t
  misc_feature (1182)..(1182): n is a, c, g, or t
  misc_feature (1184)..(1184): n is a, c, g, or t
  misc_feature (1188)..(1188): n is a, c, g, or t
  misc_feature (1194)..(1194): n is a, c, g, or t
  misc_feature (1199)..(1199): n is a, c, g, or t
  misc_feature (1208)..(1208): n is a, c, g, or t
  misc_feature (1213)..(1213): n is a, c, g, or t
  misc_feature (1218)..(1218): n is a, c, g, or t
gatctgccccatctgcttcaagaacgagatggacttctggaaggtggacctcaagttcctggacgactgttgcaagagccacctgagcgagaagcgcgaggagctggaggagatcgcgcgccgcgtgcagctcatcctggacgacctgggcgtggacgcggccgagggccgctggcgccgctgccagaagtgcgtctggaagttcctggagaagcccgagtcgtcgtgcccggcgcgggtggtggccgtgctctccttcctgctcatcctcgtctcgtccgtggtcatgtgcatgggcaccatccccgagctgcaggtgctggacgccgagggcaaccgcgtggagcacccgacgctggagaacgtggagacggcgtgcattggctggttcaccctggagtacctgctgcgcctcttctcgtcacccaacaagctgcacttcgcgctgtccttcatgaacattgtggacgtgctggccatcctccccttctacgtgagcctcacgctcacgcacctgggtgcccgcatgatggagctgaccaacgtgcagcaggccgtgcaggcgctgcggatcatgcgcatcgcgcgcatcttcaagctggcccgccactcctcgggcctgcagaccctcacctatgccctcaagcgcagcttcaaggaactggggctgctgctcatgtacctggcagtgggtatcttcgtcttctctgccctgggctacaccatgnancaaagccatccaaaaaaccctgtttaagagcatccccccaatnctttctggtgggccatcatcaccatgaccaccgtcggctacggcgaacntctacccccaagaacangcctgggcaagctcaacccggcccatccancttcctggggnggngtaattgccatcccccctgcccatcccacccnattattaaaaaaattttttccaggtantaaaaanaaagcancnngttcctggaaaaacccggccaaaccncgaacntggaannttaangaaannaanctccnncaaacggggncaaaggcaaaaaccggggnccncccccaagaacctngaaaaccnccntccaaaacncnngggaaaaaaggccccaanttnaacanccggttaaaatttccaaaannaacctttttnccctntgaaaaaaaaaaacccacagacccgcctccaantnaaanaaaaangcccntcagaaaanagacnccccngga

SEQ ID NO: 129 - DNA, 1242 bp, Homo sapiens
  misc_feature (835)..(835): n is a, c, g, or t
  misc_feature (860)..(860): n is a, c, g, or t
  misc_feature (912)..(912): n is a, c, g, or t
  misc_feature (918)..(918): n is a, c, g, or t
  misc_feature (949)..(949): n is a, c, g, or t
  misc_feature (953)..(953): n is a, c, g, or t
  misc_feature (961)..(961): n is a, c, g, or t
  misc_feature (969)..(969): n is a, c, g, or t
  misc_feature (982)..(982): n is a, c, g, or t
  misc_feature (993)..(993): n is a, c, g, or t
  misc_feature (1003)..(1003): n is a, c, g, or t
  misc_feature (1009)..(1009): n is a, c, g, or t
  misc_feature (1011)..(1011): n is a, c, g, or t
  misc_feature (1017)..(1017): n is a, c, g, or t
  misc_feature (1019)..(1019): n is a, c, g, or t
  misc_feature (1027)..(1027): n is a, c, g, or t
  misc_feature (1033)..(1033): n is a, c, g, or t
  misc_feature (1035)..(1036): n is a, c, g, or t
  misc_feature (1040)..(1040): n is a, c, g, or t
  misc_feature (1042)..(1042): n is a, c, g, or t
  misc_feature (1055)..(1055): n is a, c, g, or t
  misc_feature (1057)..(1057): n is a, c, g, or t
  misc_feature (1064)..(1064): n is a, c, g, or t
  misc_feature (1071)..(1071): n is a, c, g, or t
  misc_feature (1073)..(1073): n is a, c, g, or t
  misc_feature (1080)..(1080): n is a, c, g, or t
  misc_feature (1100)..(1100): n is a, c, g, or t
  misc_feature (1102)..(1102): n is a, c, g, or t
  misc_feature (1106)..(1106): n is a, c, g, or t
  misc_feature (1110)..(1110): n is a, c, g, or t
  misc_feature (1115)..(1115): n is a, c, g, or t
  misc_feature (1128)..(1128): n is a, c, g, or t
  misc_feature (1132)..(1132): n is a, c, g, or t
  misc_feature (1135)..(1135): n is a, c, g, or t
  misc_feature (1140)..(1140): n is a, c, g, or t
  misc_feature (1157)..(1157): n is a, c, g, or t
  misc_feature (1160)..(1160): n is a, c, g, or t
  misc_feature (1168)..(1168): n is a, c, g, or t
  misc_feature (1173)..(1173): n is a, c, g, or t
  misc_feature (1178)..(1178): n is a, c, g, or t
  misc_feature (1181)..(1181): n is a, c, g, or t
  misc_feature (1184)..(1184): n is a, c, g, or t
  misc_feature (1187)..(1187): n is a, c, g, or t
  misc_feature (1202)..(1202): n is a, c, g, or t
  misc_feature (1206)..(1206): n is a, c, g, or t
  misc_feature (1220)..(1220): n is a, c, g, or t
  misc_feature (1232)..(1232): n is a, c, g, or t
  misc_feature (1236)..(1237): n is a, c, g, or t
ggtttgagagatgaagtagaagcaaaagcaaaacttattactgatcttcaagaccaaaaccagaaaatgatgttagagcaggaacgtctaagagtagaacatgagaagttgaaagccacagatcaggaaaagagcagaaaactacatgaacttacggttatgcaagatagacgagaacaagcaagacaagacttgaagggtttggaagagacagtggcaaaagaacttcagactttacacaacctgcgcaaactctttgttcaggacctggctacaagagttaaaaagagtgctgagattgattctgatgacaccggaggcagcgctgctcagaagcaaaaaatctcctttcttgaaaataatcttgaacagctcactaaagtgcacaaacagttggtacgtgataatgcagatctccgctgtgaacttcctaagttggaaaagcgacttcgagctacagctgagagagtgaaagctttggaatcagcactgaaagaagctaaagaaaatgcatctcgtgatcgcaaacgctatcagcaagaagtagatcgcataaaggaagcagtcaggtcaaagaatatggccagaagagggcattctgcacagattgctaaacctattcgtcccgggcaacatccagcagcttctccaactcacccaagtgcaattcgtggaggaggtgcatttgttcagaacagccagccagtggcagtgcgaggtggaggaggcaaacaagtgtaatcgtttatacatacccacaggtgttaaaaagtaatcgaagtacgaagaggacatggtatcaagcagtcattcaatgactataacctctactccntgggatggtagaattataacttttnaaaaaaatgtataaattatacctggcctgtacagctgtttcctacctactcntctggnaaactctgctgcttcccaacacaactagagngcanttttggcntcttaggngggaaaaaggacngtttacactgnggccctattnttaccngnttggcnancgggcctnaaattnanncttncngggccaggctacngnccttaanggacggncntttggantttttgggggggttattttnancccngttnaaatncccaccgccccgnctcntgnttttntttcccataaaaccccnccntttttttnttaanaaaanggnacnttngggtaaggcctttantttncccttaaccccccngccccaaaattncccnncccgg

SEQ ID NO: 130 - DNA, 722 bp, Homo sapiens
  misc_feature (695)..(695): n is a, c, g, or t
  misc_feature (699)..(700): n is a, c, g, or t
  misc_feature (702)..(703): n is a, c, g, or t
  misc_feature (706)..(722): n is a, c, g, or t
ggggagcccagctgcccaccctctggacattcacccagccaggtggtctcgtcacctcagaggctccgccagactcctgcccaggccaggactgaggcaagcctcaaggcacttctaggacctgcctcttctcaccaagatgaactcactggtttcttggcagctactgcttttcctctgtgccacccactttggggagccattagaaaaggtggcctctgtggggaattctagacccacaggccagcagctagaatccctgggcctcctggcccccggggagcagagcctgccgtgcaccgagaggaagccagctgctactgccaggctgagccgtcgggggacctcgctgtccccgccccccgagagctccgggagcccccagcagccgggcctgtccgccccccacagccgccagatccccgcaccccagggcgcggtgctggtgcagcgggagaaggacctgccgaactacaactggaactccttcggcctgcgcttcggcaagcgggaggcggcaccagggaaccacggcagaagcgctgggcggggctgagggcgcaggtgcggggcagtgaacttcagaccccaaaggagtcagagcatgcggggcgggggcggggggcggggacgtagggctaagggagggggcgctggagcttccaacccgaggcaataaaagaaatgttgcgtanctcnnannaannnnnnnnnnnnnnnnn

SEQ ID NO: 131 - DNA, 1251 bp, Homo sapiens
  misc_feature (840)..(840): n is a, c, g, or t
  misc_feature (862)..(862): n is a, c, g, or t
  misc_feature (875)..(875): n is a, c, g, or t
  misc_feature (883)..(883): n is a, c, g, or t
  misc_feature (900)..(900): n is a, c, g, or t
  misc_feature (934)..(934): n is a, c, g, or t
  misc_feature (971)..(971): n is a, c, g, or t
  misc_feature (979)..(979): n is a, c, g, or t
  misc_feature (984)..(984): n is a, c, g, or t
  misc_feature (1010)..(1010): n is a, c, g, or t
  misc_feature (1021)..(1021): n is a, c, g, or t
  misc_feature (1025)..(1025): n is a, c, g, or t
  misc_feature (1027)..(1027): n is a, c, g, or t
  misc_feature (1035)..(1035): n is a, c, g, or t
  misc_feature (1047)..(1047): n is a, c, g, or t
  misc_feature (1051)..(1052): n is a, c, g, or t
  misc_feature (1063)..(1063): n is a, c, g, or t
  misc_feature (1066)..(1066): n is a, c, g, or t
  misc_feature (1084)..(1084): n is a, c, g, or t
  misc_feature (1088)..(1088): n is a, c, g, or t
  misc_feature (1096)..(1096): n is a, c, g, or t
  misc_feature (1099)..(1099): n is a, c, g, or t
  misc_feature (1103)..(1103): n is a, c, g, or t
  misc_feature (1105)..(1105): n is a, c, g, or t
  misc_feature (1107)..(1107): n is a, c, g, or t
  misc_feature (1109)..(1109): n is a, c, g, or t
  misc_feature (1111)..(1111): n is a, c, g, or t
  misc_feature (1115)..(1115): n is a, c, g, or t
  misc_feature (1119)..(1119): n is a, c, g, or t
  misc_feature (1128)..(1128): n is a, c, g, or t
  misc_feature (1132)..(1132): n is a, c, g, or t
  misc_feature (1141)..(1141): n is a, c, g, or t
  misc_feature (1152)..(1152): n is a, c, g, or t
  misc_feature (1162)..(1162): n is a, c, g, or t
  misc_feature (1164)..(1164): n is a, c, g, or t
  misc_feature (1167)..(1167): n is a, c, g, or t
  misc_feature (1183)..(1183): n is a, c, g, or t
  misc_feature (1187)..(1187): n is a, c, g, or t
  misc_feature (1198)..(1198): n is a, c, g, or t
  misc_feature (1203)..(1203): n is a, c, g, or t
  misc_feature (1206)..(1206): n is a, c, g, or t
  misc_feature (1226)..(1226): n is a, c, g, or t
  misc_feature (1228)..(1228): n is a, c, g, or t
  misc_feature (1236)..(1236): n is a, c, g, or t
  misc_feature (1248)..(1249): n is a, c, g, or t
gaccttttccccaatgatgaagacgacccagggcaaggaatccagcagcagcacagcagtgcagccgcggctgcccagcagggcggctacgagatccccgcgcggctgcggacgctccacaacctggtgatccagtacgcctcgcaggggcgctacgaggtagctgtgcccctctgcaagcaggccctggaggacctggagaagacttcaggacacgaccacccggacgtggccaccatgctcaacatcctggccttggtgtacagggatcagaataaatacaaagatgcagctaacctactgaatgatgccttggctattcgtgagaaaactttgggcaaagatcatcctgcggtggcggcgactttgaataaccttgcagtcctttatggtaaaagagggaagtacaaagaagcagagccgttgtgtaaaagagctctggaaatccgagaaaaggttttggggaaggatcaccccgatgttgccaagcagttaaataacttggccttactgtgccagaaccagggcaagtatgaagaagtagaatattattatcaaagagccctcgagatctaccagacaaaactgggacctgatgaccccaacgtggctaagacgaaaaataacctggcatcctgctatttgaaacaaggaaagttcaagcaagcagaaacactgtacaaagagattctcactcgtgcacatgaaagggagtttggttctgtagatgatgaaaataaacccatctggatgcatgctgaagaaagagaagaatgcaaaggaaagcaaagggatgggacatcttttggagagtatggcggctggtacaaagcctgcaangttgatagtccaactgttacanccactctaaaaancttggggncactttacagacgtcanggcaaatttgaagctgcaaaaacgttaaaaaaanctgctatgaggtctcgtaaacagggtcttgaaatgtnccaaacanagggnggcaaaaatgctcatgaccctgaaanatggaaaaccnagancnggaaaacntcacgggactgntcannaaaaatggccnganggagggggaaatgagaantaanccgggggntantgantntnangncccnggcnaaccccggnattncaaggttcnggggggggggncccccaattncnttntcccaggggcccgggntaanccctaaatttnaaagnccnttgaagggcctttttggggncntttggggnccttttttaaanntt

SEQ ID NO: 132 - DNA, 837 bp, Homo sapiens
  misc_feature (814)..(837): n is a, c, g, or t
gagaggacctgggagaagcttctgctggcagctcgtgcaattgttgccattgaaaaccctgctgatgtcagtgttatatcctccaggaatactggccagagggctgtgctgaagtttgctgctgccactggagccactccaattgctggccgcttcactcctggaaccttcactaaccagatccaggcagccttccgggagccacggcttcttgtggttactgaccccagggctgaccaccagcctctcacggaggcatcttatgttaacctacctaccattgcgctgtgtaacacagattctcctctgcgctatgtggacattgccatcccatgcaacaacaagggagctcactcagtgggtttgatgtggtggatgctggctcgggaagttctgcgcatgcgtggcaccatttcccgtgaacacccatgggaggtcatgcctgatctgtacttctacagagatcctgaagagattgaaaaagaagagcaggctgctgctgagaaggcagtgaccaaggaggaatttcagggtgaatggactgctcccgctcctgagttcactgctactcagcctgaggttgcagactggtctgaaggtgtacaggtgccctctgtgcctattcagcaattccctactgaagactggagcgctcagcctgccacggaagactggtctgcagctcccactgctcaggccactgaatgggtaggagcaaccactgactggtcttaagctgttcttgcataggctcttaaagcagcatggaaaaatggttgatggaaaataaacatcagttttctaaaaaaaaaannnnnnnnnnnnnnnnnnnnnnnn

SEQ ID NO: 133 - DNA, 880 bp, Homo sapiens
  misc_feature (774)..(774): n is a, c, g, or t
  misc_feature (838)..(838): n is a, c, g, or t
  misc_feature (840)..(840): n is a, c, g, or t
  misc_feature (874)..(874): n is a, c, g, or t
gagttgattgtgcagaatacactgcctgtcgcttgtcttctattcaccatggcttcttctgatatccaggtgaaagaactggagaagcgtgcctcaggccaggcttttgagctgattctcagccctcggtcaaaagaatctgttccagaattccccctttcccctccaaagaagaaggatctttccctggaggaaattcagaagaaattagaagctgcagaagaaagacgcaagtcccatgaagctgaggtcttgaagcagctggctgagaaacgagagcacgagaaagaagtgcttcagaaggcaatagaagagaacaacaacttcagtaaaatggcagaagagaaactgacccacaaaatggaagctaataaagagaaccgagaggcacaaatggctgccaaactggaacgtttgcgagagaaggataagcacattgaagaagtgcggaagaacaaagaatccaaagaccctgctgacgagactgaagctgactaatttgttctgagaactgactttctccccatccccttcctaaatatccaaagactgtataggtagatccagatccagactgtaagatgttgttttaggggctaaaggggagaaactgaaagtgttttactctttttctaaagtgttggtctttctaatgtagctatttttcttgttgcatcttttctacttcagtacacttggtgtactgggttaatggctagtactgtattggctctgtgaaaacatatttgtgaaaaagagtatgtagtggcttcnttttgaactgttagatgctgaatatctgttcacttttcaatcccaattctgtcccaatcttacnanatgctactggacttgaatggttaataaaactgcncagtgc

SEQ ID NO: 134 - DNA, 1107 bp, Homo sapiens
  misc_feature (863)..(863): n is a, c, g, or t
  misc_feature (884)..(884): n is a, c, g, or t
  misc_feature (896)..(896): n is a, c, g, or t
  misc_feature (910)..(910): n is a, c, g, or t
  misc_feature (913)..(913): n is a, c, g, or t
  misc_feature (927)..(927): n is a, c, g, or t
  misc_feature (935)..(935): n is a, c, g, or t
  misc_feature (939)..(939): n is a, c, g, or t
  misc_feature (955)..(955): n is a, c, g, or t
  misc_feature (961)..(961): n is a, c, g, or t
  misc_feature (969)..(969): n is a, c, g, or t
  misc_feature (972)..(972): n is a, c, g, or t
  misc_feature (994)..(994): n is a, c, g, or t
  misc_feature (1021)..(1021): n is a, c, g, or t
  misc_feature (1027)..(1027): n is a, c, g, or t
  misc_feature (1031)..(1031): n is a, c, g, or t
  misc_feature (1039)..(1040): n is a, c, g, or t
  misc_feature (1042)..(1042): n is a, c, g, or t
  misc_feature (1050)..(1050): n is a, c, g, or t
  misc_feature (1052)..(1052): n is a, c, g, or t
  misc_feature (1056)..(1059): n is a, c, g, or t
  misc_feature (1064)..(1064): n is a, c, g, or t
  misc_feature (1081)..(1081): n is a, c, g, or t
  misc_feature (1087)..(1087): n is a, c, g, or t
  misc_feature (1089)..(1089): n is a, c, g, or t
  misc_feature (1093)..(1093): n is a, c, g, or t
  misc_feature (1104)..(1104): n is a, c, g, or t
gcggacgcgtgggcagaggtctccagagccttctctctcctgtgcaaaatggcaactcttaaggaaaaactcattgcaccagttgcggaagaagaggcaacagttccaaacaataagatcactgtagtgggtgttggacaagttggtatggcgtgtgctatcagcattctgggaaagtctctggctgatgaacttgctcttgtggatgttttggaagataagcttaaaggagaaatgatggatctgcagcatgggagcttatttcttcagacacctaaaattgtggcagataaagattattctgtgaccgccaattctaagattgtagtggtaactgcaggagtccgtcagcaagaaggggagagtcggctcaatctggtgcagagaaatgttaatgtcttcaaattcattattcctcagatcgtcaagtacagtcctgattgcatcataattgtggtttccaacccagtggacattcttacgtatgttacctggaaactaagtggattacccaaacaccgcgtgattggaagtggatgtaatctggattctgctagatttcgctaccttatggctgaaaaacttggcattcatcccagcagctgccatggatggattttgggggaacatggcgactcaagtgtggctgtgtggagtggtgtgaatgtggcaggtgtttctctccaggaattgaatccagaaatgggaactgacaatgatagtgaaaattggaaggaagtgcataagatggtggttgaaagtgcctatgaagtcatcaagctaaaaggatataccaactgggctattggattaagtgtggctgatcttattgaatccatgttgaaaaatctatccaggattcntcccgtgtcacaatggtaaangggatgtatggncattgaaaatgaantcntcctgaaccttccntgtatccncatngcccggggaataaccngcgttntccacccnaanctaaaggatgatgaggttgccncctcaaaaaagggcaaaaccctggggnactccnaagnaccaaaanncngggactangnaccnnnngctgnaaaatttaaaacccaangggatnancccngcctttatttnccc

SEQ ID NO: 135 - DNA, 1031 bp, Homo sapiens
  misc_feature (810)..(810): n is a, c, g, or t
  misc_feature (818)..(818): n is a, c, g, or t
  misc_feature (840)..(840): n is a, c, g, or t
  misc_feature (859)..(859): n is a, c, g, or t
  misc_feature (862)..(862): n is a, c, g, or t
  misc_feature (880)..(880): n is a, c, g, or t
  misc_feature (886)..(886): n is a, c, g, or t
  misc_feature (907)..(907): n is a, c, g, or t
  misc_feature (928)..(928): n is a, c, g, or t
  misc_feature (934)..(934): n is a, c, g, or t
  misc_feature (938)..(938): n is a, c, g, or t
  misc_feature (941)..(941): n is a, c, g, or t
  misc_feature (944)..(944): n is a, c, g, or t
  misc_feature (946)..(946): n is a, c, g, or t
  misc_feature (948)..(948): n is a, c, g, or t
  misc_feature (956)..(956): n is a, c, g, or t
  misc_feature (965)..(965): n is a, c, g, or t
  misc_feature (990)..(990): n is a, c, g, or t
  misc_feature (996)..(996): n is a, c, g, or t
  misc_feature (1010)..(1012): n is a, c, g, or t
  misc_feature (1014)..(1014): n is a, c, g, or t
  misc_feature (1018)..(1019): n is a, c, g, or t
  misc_feature (1030)..(1030): n is a, c, g, or t
gcgaaagatgcagctcttgctactgcacttggtgacaaaaaaagtttagagggagatttggaggatctgaaggatcagattgcccagttggaagcctccttagctgcagccaaaaaacagttagcagatgaaactttacttaaagtagatttggagaatcgttgtcagagccttactgaggacttggagtttcgcaaaagcatgtatgaagaggagattaacgagaccagaaggaagcatgaaacgcgcttggtagaggtggattctgggcgtcaaattgagtatgagtacaagctggcgcaagcccttcatgagatgagagagcaacatgatgcccaagtgaggctgtataaggaggagctggagcagacttaccatgccaaacttgagaatgccagactgtcatcagagatgaatacttctactgtcaacagtgccagggaagaactgatggaaagccgcatgagaattgagagcctttcatcccagctttctaatctacagaaagagtctagagcatgtttggaaaggattcaagaattagaggacttgcttgctaaagaaaaagacaactctcgtcgcatgctgacagacaaagagagagagatggcggaaataagggatcaaatgcagcaacagctgaatgactatgaacagcttcttgatgtaaagttagccctggacatggaaatcagtgcttacaggaaactcttagaaggcgaagaagagaggttgaagctgtctccaagcccttcttcccgtgtgacagtatcccgagcatcctcaagtcgtagtgtacgtaccaactanaaggaaancggaagagggttgatgtggaanaatcaaaggcgagtagtantgnttagcatctctcattccncctcancccctggaaatgtttgcatcnaaaaaattgatgttgatgggnaaattntccnctnganancncttctgancaggatcanccaatggggaggctggaaatgatcnaaaaanttggaaacccctcnnncngttnnaaaaaaacccnc

SEQ ID NO: 136 - DNA, 898 bp, Homo sapiens
  misc_feature (623)..(623): n is a, c, g, or t
  misc_feature (741)..(741): n is a, c, g, or t
  misc_feature (746)..(746): n is a, c, g, or t
  misc_feature (751)..(751): n is a, c, g, or t
  misc_feature (765)..(765): n is a, c, g, or t
  misc_feature (777)..(777): n is a, c, g, or t
  misc_feature (792)..(792): n is a, c, g, or t
  misc_feature (806)..(806): n is a, c, g, or t
  misc_feature (830)..(830): n is a, c, g, or t
  misc_feature (837)..(838): n is a, c, g, or t
  misc_feature (841)..(842): n is a, c, g, or t
  misc_feature (856)..(856): n is a, c, g, or t
  misc_feature (858)..(859): n is a, c, g, or t
  misc_feature (864)..(864): n is a, c, g, or t
  misc_feature (872)..(872): n is a, c, g, or t
  misc_feature (879)..(879): n is a, c, g, or t
  misc_feature (884)..(885): n is a, c, g, or t
  misc_feature (892)..(892): n is a, c, g, or t
  misc_feature (894)..(894): n is a, c, g, or t
  misc_feature (896)..(896): n is a, c, g, or t
ggccgtgcgggagcagtagtgacagtgacgggggcagcctgggcgaccagggctgcttctcagagccacagcgctgtgatggctggtggcattgtgccagcggtcgagacgagcagggctgccctgcctgcccgcccgaccagtacccctgcgagggtggcagtggtctgtgctacacgcctgccgaccgctgcaacaaccagaaaagctgtcccgacggcgccgacgagaagaactgcttctcctgccagcccggcaccttccactgcggtaccaacctgtgcatcttcgagacgtggcgctgtgacggccaggaagactgccaggacggcagcgatgagcatgggtgcctggccgccgtgccccgcaaggtcatcacggcggcgctcattggcagcctggtgtgtggcctgctgctggtcatcgcgctgggctgcgccttcaagctctactcactgcgcacgcaggaatacagggccttcgagacccagatgacgcgcctggaggctgagttcgtgcggcgggaggcacccccatcctatggtcagctcatcgcccagggcctcattccacccgtggaggactttcctgtctacagtgcgtcccaggcctctgtgctgcanaatcttcgcacagccatgcggagacagatgcgtcggcacgcctcccgccgggggccctcccgccgccgcctcggccgcctctggaaccggctctttcaccggccgcgggcgccccgangccanatccnactgctgaccgcancacgcccctcanaaaccgtgctgggcnatggcttcctccanccttgctccaggggctgcccccancccccannacnntaatggaaacaggnannaccangcggccgnaaaaagnccccnntgccccngncntg

SEQ ID NO: 137 - DNA, 1044 bp, Homo sapiens
  misc_feature (739)..(739): n is a, c, g, or t
  misc_feature (851)..(851): n is a, c, g, or t
  misc_feature (862)..(862): n is a, c, g, or t
  misc_feature (930)..(930): n is a, c, g, or t
  misc_feature (939)..(939): n is a, c, g, or t
  misc_feature (941)..(941): n is a, c, g, or t
  misc_feature (958)..(958): n is a, c, g, or t
  misc_feature (964)..(964): n is a, c, g, or t
  misc_feature (970)..(970): n is a, c, g, or t
  misc_feature (979)..(979): n is a, c, g, or t
  misc_feature (987)..(987): n is a, c, g, or t
  misc_feature (989)..(989): n is a, c, g, or t
  misc_feature (995)..(995): n is a, c, g, or t
  misc_feature (1000)..(1000): n is a, c, g, or t
  misc_feature (1009)..(1009): n is a, c, g, or t
  misc_feature (1015)..(1015): n is a, c, g, or t
  misc_feature (1023)..(1027): n is a, c, g, or t
  misc_feature (1037)..(1037): n is a, c, g, or t
  misc_feature (1043)..(1043): n is a, c, g, or t
ggcgagacacttcgccgaggcacagcagccggcaggatggcgaccgtggtggtggaagccaccgagccggagccgtccggcagcatcgccaacccggcggcgtccacctcgcctagcctgtcgcaccgcttccttgacagcaagttctacttgctggtggtcgtcggcgagatcgtgaccgaggagcacctgcggcgtgccatcggcaacatcgagctcggaatccgatcatgggacacaaacctgattgaatgcaacttggaccaagaactcaaactttttgtatctcgacactctgcaagattctctcctgaagtcccaggacaaaagatccttcatcaccgaagtgacgttttagaaacagtggtcctgatcaacccttctgatgaagcagtcagcaccgaggtgcgcttaatgatcactgatgctgcccgacacaagctgctcgtgctgaccgggcagtgctttgaaaataccggagagctcattctccagtccggctctttctccttccagaacttcatagagattttcaccgatcaagagatcggggagttactaagcaccacccatcctgccaacaaagccagcttaaccctgttctgtcctgaagaaggggactggaagaactccaatcttgacagacacaatctccaagacttcatcaatattaaactcaattcagcttctatcttgccagaaatggaaggactttctgagtttaccgagtatctctcanaatcagtggaagtcccatctccctttgacatcttggaacctcccacatcgggtggatttctgaagctctccaagccctgctgttatattttttccaggaaggaaggggcganttctgccttgntttgcagtgaatggttttcaatatgctcatcaatggcggatcaaaaaaaaaaatcctgcttttggaancctcatccnanacttaaaaccgagtggnactccntcctgntccacccanattggggnangaaaantttgncctggaaanaaacancatgtttnnnnngaaaaaattncaaaant

SEQ ID NO: 138 - DNA, 1164 bp, Homo sapiens
  misc_feature (718)..(718): n is a, c, g, or t
  misc_feature (751)..(751): n is a, c, g, or t
  misc_feature (773)..(773): n is a, c, g, or t
  misc_feature (776)..(776): n is a, c, g, or t
  misc_feature (781)..(781): n is a, c, g, or t
  misc_feature (799)..(799): n is a, c, g, or t
  misc_feature (823)..(823): n is a, c, g, or t
  misc_feature (834)..(834): n is a, c, g, or t
  misc_feature (840)..(840): n is a, c, g, or t
  misc_feature (842)..(843): n is a, c, g, or t
  misc_feature (849)..(849): n is a, c, g, or t
  misc_feature (853)..(853): n is a, c, g, or t
  misc_feature (855)..(855): n is a, c, g, or t
  misc_feature (864)..(864): n is a, c, g, or t
  misc_feature (868)..(868): n is a, c, g, or t
  misc_feature (874)..(874): n is a, c, g, or t
  misc_feature (878)..(878): n is a, c, g, or t
  misc_feature (887)..(887): n is a, c, g, or t
  misc_feature (894)..(894): n is a, c, g, or t
  misc_feature (901)..(901): n is a, c, g, or t
  misc_feature (914)..(914): n is a, c, g, or t
  misc_feature (916)..(916): n is a, c, g, or t
  misc_feature (923)..(923): n is a, c, g, or t
  misc_feature (927)..(928): n is a, c, g, or t
  misc_feature (931)..(931): n is a, c, g, or t
  misc_feature (957)..(957): n is a, c, g, or t
  misc_feature (962)..(963): n is a, c, g, or t
  misc_feature (976)..(976): n is a, c, g, or t
  misc_feature (992)..(994): n is a, c, g, or t
  misc_feature (1022)..(1023): n is a, c, g, or t
  misc_feature (1031)..(1032): n is a, c, g, or t
  misc_feature (1046)..(1046): n is a, c, g, or t
  misc_feature (1054)..(1054): n is a, c, g, or t
  misc_feature (1061)..(1061): n is a, c, g, or t
  misc_feature (1063)..(1063): n is a, c, g, or t
  misc_feature (1071)..(1072): n is a, c, g, or t
  misc_feature (1095)..(1096): n is a, c, g, or t
  misc_feature (1104)..(1104): n is a, c, g, or t
  misc_feature (1115)..(1115): n is a, c, g, or t
  misc_feature (1124)..(1124): n is a, c, g, or t
  misc_feature (1137)..(1137): n is a, c, g, or t
  misc_feature (1151)..(1152): n is a, c, g, or t
  misc_feature (1161)..(1161): n is a, c, g, or t
  misc_feature (1164)..(1164): n is a, c, g, or t
ggctctggtgaacctccaaaatcaggggatcgcagcggctacagcagccccggctccccaggcactcccggcagccgctcccgcaccccgtcccttccaaccccacccacccgggagcccaagaaggtggcagtggtccgtactccacccaagtcgccgtcttccgccaagagccgcctgcagacagcccccgtgcccatgccagacctgaagaatgtcaagtccaagatcggctccactgagaacctgaagcaccagccgggaggcgggaaggtgcaaatagtctacaaaccagttgacctgagcaaggtgacctccaagtgtggctcattaggcaacatccatcataaaccaggaggtggccaggtggaagtaaaatctgagaagcttgacttcaaggacagagtccagtcgaagattgggtccctggacaatatcacccacgtccctggcggaggaaataaaaagattgaaacccacaagctgaccttccgcgagaacgccaaagccaagacagaccacggggcggagatcgtgtacaagtcgccagtggtgtctggggacacgtctccacggcatctcagcaatgtctcctccaccggcagcatcgacatggtagactcgcccccagctcgccacgctagctgacgaggtgtctgcctccctggccaagcagggtttgtgatcaggcccctgggggcggtcaataattgtgganaggaaaaaatgaaaaagtgtggaaaaaaaaaanaataatggaccggggcccccgnccntttgnccccaggttgctcctcgnaattcggttaaattggttaaaccncttaaacctgntttttntnnctcggntttngnctcgggaanttcnaaatcngtgngtggggaanaaaaaanaaatttntttttttccaaantngaagggngggnntantaataaaaaattttttaaaaaaaaanttttnnaaaaaattggccnattccaaaattttccnnngggaaatccctttttaaatttttttttnntccccccnncggtaaaaaaaggnaaaaaaanaaaagtntntaaaattnntttttgggggaattttaaggggnnggggggtnccaaacccccntggggcctnttggggggggttncaaaaagggggggnnaaaaaaaanatn

SEQ ID NO: 139 - DNA, 1143 bp, Homo sapiens
  misc_feature (767)..(767): n is a, c, g, or t
  misc_feature (822)..(822): n is a, c, g, or t
  misc_feature (888)..(888): n is a, c, g, or t
  misc_feature (890)..(890): n is a, c, g, or t
  misc_feature (898)..(898): n is a, c, g, or t
  misc_feature (913)..(913): n is a, c, g, or t
  misc_feature (918)..(918): n is a, c, g, or t
  misc_feature (927)..(927): n is a, c, g, or t
  misc_feature (941)..(941): n is a, c, g, or t
  misc_feature (943)..(943): n is a, c, g, or t
  misc_feature (948)..(948): n is a, c, g, or t
  misc_feature (987)..(987): n is a, c, g, or t
  misc_feature (1018)..(1018): n is a, c, g, or t
  misc_feature (1026)..(1027): n is a, c, g, or t
  misc_feature (1035)..(1035): n is a, c, g, or t
  misc_feature (1038)..(1038): n is a, c, g, or t
  misc_feature (1040)..(1040): n is a, c, g, or t
  misc_feature (1047)..(1047): n is a, c, g, or t
  misc_feature (1058)..(1059): n is a, c, g, or t
  misc_feature (1063)..(1064): n is a, c, g, or t
  misc_feature (1073)..(1076): n is a, c, g, or t
  misc_feature (1081)..(1081): n is a, c, g, or t
  misc_feature (1088)..(1089): n is a, c, g, or t
  misc_feature (1102)..(1102): n is a, c, g, or t
  misc_feature (1106)..(1107): n is a, c, g, or t
  misc_feature (1120)..(1120): n is a, c, g, or t
  misc_feature (1124)..(1124): n is a, c, g, or t
  misc_feature (1128)..(1128): n is a, c, g, or t
  misc_feature (1134)..(1134): n is a, c, g, or t
  misc_feature (1138)..(1138): n is a, c, g, or t
  misc_feature (1141)..(1141): n is a, c, g, or t
gcccacgcgtccgatggcctcaagccacgctgcataacccgagacctcaaatggggaacccctgtacccttagaaggttttgaagacaaggtattctatgtctggtttgatgccactattggctatctgtccatcacagccaactacacagaccagtgggagagatggtggaagaacccagagcaagtggacctgtatcagttcatggccaaagacaatgttcctttccatagcttagtctttccttgctcagccctaggagctgaggataactataccttggtcagccacctcattgctacagagtacctgaactatgaggatgggaaattctctaagagccgcggtgtgggagtgtttggggacatggcccaggacacggggatccctgctgacatctggcgcttctatctgctgtacattcggcctgagggccaggacagtgctttctcctggacggacctgctgctgaagaataattctgagctgcttaacaacctgggcaacttcatcaacagagctgggatgtttgtgtctaagttctttgggggctatgtgcctgagatggtgctcacccctgatgatcagcgcctgctggcccatgtcaccctggagctccagcactatcaccagctacttgagaaggttcggatccgggatgccttgcgcagtatcctcaccatatctcgacatggcaaccaatatattcaggtgaatgagccctggaagcggattaaaggcagtgaggctgacaggcaacgggcagnaacagtgactggcttggcagtgaatatagctgccttgctctctgtcatgcttcanccttacatgcccacggtcagtgccacaaatccaggccccagctgcagctcccacctcccagcctgnantatcctgntgaaaaacttcctgngtacnttaccagcnggaccccaaatggncnagtcngtcccttgttccaaaaattggaaatgaaccaattgaaantttaaggcaccccttttggagggggccaagnaaaaaccnnccccaaanccncnatttttnaaaaactgttnnaacnncccaacccnnnnaaaanaaaaggnntgtatgggtgaangggnnaaaaaagggaaantttntccnaaaatngaanccnaa

SEQ ID NO: 140 - DNA, 1063 bp, Homo sapiens
  misc_feature (753)..(753): n is a, c, g, or t
  misc_feature (784)..(784): n is a, c, g, or t
  misc_feature (788)..(788): n is a, c, g, or t
  misc_feature (838)..(838): n is a, c, g, or t
  misc_feature (860)..(860): n is a, c, g, or t
  misc_feature (875)..(875): n is a, c, g, or t
  misc_feature (886)..(886): n is a, c, g, or t
  misc_feature (893)..(893): n is a, c, g, or t
  misc_feature (898)..(898): n is a, c, g, or t
  misc_feature (908)..(908): n is a, c, g, or t
  misc_feature (922)..(922): n is a, c, g, or t
  misc_feature (940)..(940): n is a, c, g, or t
  misc_feature (949)..(949): n is a, c, g, or t
  misc_feature (960)..(960): n is a, c, g, or t
  misc_feature (966)..(966): n is a, c, g, or t
  misc_feature (973)..(974): n is a, c, g, or t
  misc_feature (976)..(976): n is a, c, g, or t
  misc_feature (983)..(984): n is a, c, g, or t
  misc_feature (987)..(987): n is a, c, g, or t
  misc_feature (990)..(990): n is a, c, g, or t
  misc_feature (995)..(995): n is a, c, g, or t
  misc_feature (1006)..(1007): n is a, c, g, or t
  misc_feature (1009)..(1010): n is a, c, g, or t
  misc_feature (1019)..(1019): n is a, c, g, or t
  misc_feature (1030)..(1030): n is a, c, g, or t
  misc_feature (1033)..(1033): n is a, c, g, or t
  misc_feature (1059)..(1059): n is a, c, g, or t
gctacggtggacacagcggccctgaagcagcctccggcgccccctccgccacccccgccagtgtcggcgcccgcggccgaggccgcgccccccgcctccgccgccactatcgccgcggcggcggccaccgccgtcgtagccccaacctcgacggtcgccgtggccccggtcgcgtctgccttggagaagaagacaaagagcaaggggccctacatctgcgctctgtgcgccaaggagttcaagaacggctacaatctccggaggcacgaagccatccacacgggagccaaggccggccgggtcccctcgggtgctatgaagatgccgaccatggtgcccctgagcctcctgagcgtgccccagctgagcggagccggcgggggagggggagaggcgggtgccggcggcggcgctgccgcagtggccgccggtggcgtggtgaccacgaccgcctcggggaagcgcatccggaagaaccatgcctgcgagatgtgtggcaaggccttccgcgacgtctaccacctgaaccgacacaagctgtcgcactcggacgagaagccctaccagtgcccggtgtgccagcagcgcttcaagcgcaaggaccgcatgagctaccacgtgcgctcacatgacggcgctgtgcacaagccctacaactgctcccactgtggcaagagcttctcccggccggatcacctcaacagtcacgtcagacaagtgcactcaacagaacggccctttcaaatgtgaganatgtgaggcagcttttcgccacgaaaggatngggntgcgggcgcacacagtacgaacacgaagaagaaagtgccatgttcacgtnttgtggcaagatgctgaacctnggctttatatttcgnaacaaatgaanggtgcanagccnagggttcttnacaatgttttgttnaacttctgcaaaaaaaangtactggtnaaggtttgtcnaatggngggcggnnancgacaannggngtnaatcngaaaaatcggnnannaataaacanccccttccaanaantttgggtttccttttcgggggcgaangggg

SEQ ID NO: 141 - DNA, 1080 bp, Homo sapiens
  misc_feature (815)..(815): n is a, c, g, or t
  misc_feature (846)..(846): n is a, c, g, or t
  misc_feature (858)..(858): n is a, c, g, or t
  misc_feature (933)..(933): n is a, c, g, or t
  misc_feature (960)..(960): n is a, c, g, or t
  misc_feature (962)..(962): n is a, c, g, or t
  misc_feature (966)..(966): n is a, c, g, or t
  misc_feature (969)..(969): n is a, c, g, or t
  misc_feature (971)..(971): n is a, c, g, or t
  misc_feature (989)..(989): n is a, c, g, or t
  misc_feature (992)..(992): n is a, c, g, or t
  misc_feature (995)..(995): n is a, c, g, or t
  misc_feature (1015)..(1015): n is a, c, g, or t
  misc_feature (1019)..(1019): n is a, c, g, or t
  misc_feature (1024)..(1024): n is a, c, g, or t
  misc_feature (1032)..(1032): n is a, c, g, or t
  misc_feature (1035)..(1036): n is a, c, g, or t
  misc_feature (1060)..(1061): n is a, c, g, or t
  misc_feature (1063)..(1063): n is a, c, g, or t
  misc_feature (1066)..(1066): n is a, c, g, or t
  misc_feature (1071)..(1071): n is a, c, g, or t
  misc_feature (1077)..(1077): n is a, c, g, or t
gatccccttgagacagaatatggcctttctgtctacaaggatcaccagaccatcaccatccaggagatgccggagaaggccccagccggccagctcccccgctctgtggacgtcattctggatgatgacttggtggataaagcgaagcctggtgaccgggttcaggtggtgggaacctaccgttgccttcctggaaagaagggaggctacacctctgggaccttcaggactgtcctgattgcctgtaatgttaagcagatgagcaaggatgctcagccctctttctctgctgaggatatagccaagatcaagaagttcagtaaaacccgatccaaggatatctttgaccagctggccaagtcattggccccaagtatccatgggcatgactatgtcaagaaagcaatcctctgcttgctcttgggaggggtggaacgagacctagaaaatggcagccacatccgtggggacatcaatattcttctaataggagacccatccgttgccaagtctcagcttctgcggtatgtgctttgcactgcaccccgagctatccccaccactggccggggctcctctggagtgggtctgacggctgctgtcaccacagaccaggaaacaggagagcgccgtctggaagcaggggccatggtcctggctgaccgaggcgtggtttgcattgatgaatttgacaaaatgtctgacatggatcgcacagccatccatgaagtgatggagcagggtcgagtgaccattgccaaggctggcatccatgctcggctgaatgcccgctgcagtgttttggcagctgccanccctgtctacggcaggtatgaccagtataanactccaatgganaacattgggctacaggactcactgctgtcacgatttgacttgctcttcatcatgctggatcaaatggatcctgancaggatcgggaaatctcaaacatgtcntncgangcncnttacaaacccctggggancanganggcaagctatgccctggggnaggntgggnaatccggnccnnaagatcccacttttcccggaaatnncnggnccccnattttnaaa

SEQ ID NO: 142 - DNA, 1158 bp, Homo sapiens
  misc_feature (750)..(750): n is a, c, g, or t
  misc_feature (796)..(796): n is a, c, g, or t
  misc_feature (859)..(859): n is a, c, g, or t
  misc_feature (861)..(861): n is a, c, g, or t
  misc_feature (896)..(896): n is a, c, g, or t
  misc_feature (898)..(898): n is a, c, g, or t
  misc_feature (907)..(907): n is a, c, g, or t
  misc_feature (912)..(912): n is a, c, g, or t
  misc_feature (916)..(916): n is a, c, g, or t
  misc_feature (923)..(923): n is a, c, g, or t
  misc_feature (925)..(926): n is a, c, g, or t
  misc_feature (928)..(928): n is a, c, g, or t
  misc_feature (953)..(953): n is a, c, g, or t
  misc_feature (991)..(991): n is a, c, g, or t
  misc_feature (1011)..(1011): n is a, c, g, or t
  misc_feature (1024)..(1024): n is a, c, g, or t
  misc_feature (1037)..(1037): n is a, c, g, or t
  misc_feature (1044)..(1044): n is a, c, g, or t
  misc_feature (1054)..(1054): n is a, c, g, or t
  misc_feature (1065)..(1065): n is a, c, g, or t
  misc_feature (1069)..(1069): n is a, c, g, or t
  misc_feature (1072)..(1074): n is a, c, g, or t
  misc_feature (1102)..(1102): n is a, c, g, or t
  misc_feature (1114)..(1114): n is a, c, g, or t
  misc_feature (1132)..(1132): n is a, c, g, or t
  misc_feature (1150)..(1150): n is a, c, g, or t
  misc_feature (1155)..(1155): n is a, c, g, or t
  misc_feature (1157)..(1157): n is a, c, g, or t
gccgacaaatgcaaatgcgtggacttccagaccctgaagctgcaggagctgcctgatgcagtcccccacggggagatgcccagacacatgcagctctactgcgacaggtacctgtgtgacaaggtcgtccctgggaacagggttaccatcatgggcatctactccatcaagaagtttggcctgactaccagcaggggccgtgacagggtgggcgtgggcatccgaagctcctacatccgtgtcctgggcatccaggtggacacagatggctctggccgcagctttgctggggccgtgagcccccaggaggaggaggagttccgtcgcctggctgccctcccaaatgtctatgaggtcatctccaagagcatcgccccctccatctttgggggcacagacatgaagaaggccattgcctgcctgctctttgggggctcccgaaagaggctccctgatggacttactcgccgaggagacatcaacctgctgatgctaggggaccctgggacagccaagtcccagcttctgaagtttgtggagaagtgttctcccattggggtatacacgtctgggaaaggcagcagcgcagctggactgacagcctcggtgatgagggacccttcgtcccggaatttcatcatggagggcggagccatggtcctggccgatggtggggtcgtctgtattgacgagtttgacaagatgcgagaagatgaccgtgtggcaatccacgaagccatggagcagcanaacatctctatcgccaaggctgggatcaccaccaccctgaactccngctgctccgtcctggctgctgccaactcagtgttcggccgctgggatgaaacaaagggggagnanaacattgacttcatgcccaccatcttgtcccgctncnaatgatctncatcntcanggatgancnnantgaggaaagggatgtgatgctggcnaacatgtcatcactctgcagtgacgcactgaaacaaancaggctggggaggggaaatnaactggccaactnaaaaatttttgcntatgccnaggaatgggnccccgctttcncaangtnnnaaaaattaaaaccctaatttttgggaangggcccccacanaaagaaaggaccccctcnccacccctcttgggggantggancnt

SEQ ID NO: 143 - DNA, 912 bp, Homo sapiens
  misc_feature (690)..(690): n is a, c, g, or t
  misc_feature (726)..(726): n is a, c, g, or t
  misc_feature (744)..(744): n is a, c, g, or t
  misc_feature (762)..(762): n is a, c, g, or t
  misc_feature (765)..(765): n is a, c, g, or t
  misc_feature (768)..(768): n is a, c, g, or t
  misc_feature (789)..(789): n is a, c, g, or t
  misc_feature (797)..(797): n is a, c, g, or t
  misc_feature (804)..(804): n is a, c, g, or t
  misc_feature (821)..(821): n is a, c, g, or t
  misc_feature (828)..(828): n is a, c, g, or t
  misc_feature (845)..(845): n is a, c, g, or t
  misc_feature (853)..(853): n is a, c, g, or t
  misc_feature (860)..(860): n is a, c, g, or t
  misc_feature (863)..(863): n is a, c, g, or t
  misc_feature (869)..(869): n is a, c, g, or t
  misc_feature (872)..(872): n is a, c, g, or t
  misc_feature (885)..(885): n is a, c, g, or t
  misc_feature (888)..(888): n is a, c, g, or t
  misc_feature (890)..(891): n is a, c, g, or t
  misc_feature (895)..(896): n is a, c, g, or t
  misc_feature (899)..(899): n is a, c, g, or t
  misc_feature (901)..(901): n is a, c, g, or t
  misc_feature (905)..(906): n is a, c, g, or t
  misc_feature (912)..(912): n is a, c, g, or t
gtcttgccatcccttctccctcgccttccttccctctcgtgccggccagtccccgccgcccctgccctgtgcacacacacgcaccccaacccagtgtcttcagcccaagtgaaatgccccgtcccgcgcctggcgccgtctgtaacctacccgcgattcctgggggagcctctcacgccaacccagaccctatccctccttcctgggctggaggtagtaacaggatccactcaccctgcggaggcagcaccagaggagggctccctggaggaggcggcaacccccatgccccaaggcaatggccctggcatcccccagggcctggacagcactgacctcgacgtccccacagaagctgtgacatgccagcctcaggggaaccccttgggctgcaccccacttctgccgaatgactctggccacccctcagagctgggcggcaccagacgggcggggaatggtgccctgggtggccccaaggcccaccggaagttgcagacacacccatctctcgccagccagggcagcaagaagagtaagagcagcagcaaatccaccacctcccagatccccctccaggcacaggaagactgctgtgtccactgcatcctgtcctgcctgttctgcgagttcctgacgctgtgcaacatcgtcctggactgcgccacctgtggctcctgcagctcggangactcgtgcctctgctgctgctgctgtggctctggngagtgtgccgactgcganctgccctgcgacctggantgnggnatcctggatgcctgctgcaantcgcggantgcctgnaaatctgcatggaatgntgtgggntctgcttctcctctgancctctgtngggggtnaancagccnggngcccctggaaaantcnannaggnnccntntganngggggn

SEQ ID NO: 144 - DNA, 472 bp, Homo sapiens
  misc_feature (459)..(460): n is a, c, g, or t
  misc_feature (471)..(472): n is a, c, g, or t
ggtgatgggggcacaggcaccaaagtccgccaaggcaccctgaagaaggcgcgctacaatgctcagtgccaggagaccatccgcgtcaccaagccctgcacccccaagaccaaagcaaaggccaaagccaagaaagggaagggaaaggactagacgccaagcctggatgccaaggagcccctggtgtcacatggggcctggcccacgccctccctctcccaggcccgagatgtgacccaccagtgccttctgtctgctcgttagctttaatcaatcatgccctgccttgtccctctcactccccagccccacccctaagtgcccaaagtggggagggacaagggattctgggaagcttgagcctcccccaaagcaatgtgagtcccagagcccgcttttgttcttccccacaattccattactaagaaacacatcaaataaactgactttttccccccnnaaaaaaaaaann

SEQ ID NO: 145 - DNA, 1181 bp, Homo sapiens
  misc_feature (738)..(738): n is a, c, g, or t
  misc_feature (764)..(764): n is a, c, g, or t
  misc_feature (766)..(766): n is a, c, g, or t
  misc_feature (789)..(789): n is a, c, g, or t
  misc_feature (792)..(792): n is a, c, g, or t
  misc_feature (813)..(813): n is a, c, g, or t
  misc_feature (860)..(860): n is a, c, g, or t
  misc_feature (886)..(886): n is a, c, g, or t
  misc_feature (898)..(898): n is a, c, g, or t
  misc_feature (909)..(909): n is a, c, g, or t
  misc_feature (919)..(919): n is a, c, g, or t
  misc_feature (923)..(923): n is a, c, g, or t
  misc_feature (925)..(925): n is a, c, g, or t
  misc_feature (932)..(932): n is a, c, g, or t
  misc_feature (935)..(935): n is a, c, g, or t
  misc_feature (943)..(943): n is a, c, g, or t
  misc_feature (966)..(966): n is a, c, g, or t
  misc_feature (968)..(968): n is a, c, g, or t
  misc_feature (974)..(974): n is a, c, g, or t
  misc_feature (976)..(977): n is a, c, g, or t
  misc_feature (992)..(993): n is a, c, g, or t
  misc_feature (1001)..(1001): n is a, c, g, or t
  misc_feature (1005)..(1005): n is a, c, g, or t
  misc_feature (1010)..(1011): n is a, c, g, or t
  misc_feature (1024)..(1025): n is a, c, g, or t
  misc_feature (1041)..(1041): n is a, c, g, or t
  misc_feature (1049)..(1049): n is a, c, g, or t
  misc_feature (1051)..(1051): n is a, c, g, or t
  misc_feature (1059)..(1059): n is a, c, g, or t
  misc_feature (1063)..(1063): n is a, c, g, or t
  misc_feature (1066)..(1066): n is a, c, g, or t
  misc_feature (1068)..(1068): n is a, c, g, or t
  misc_feature (1077)..(1077): n is a, c, g, or t
  misc_feature (1083)..(1083): n is a, c, g, or t
  misc_feature (1102)..(1102): n is a, c, g, or t
  misc_feature (1111)..(1111): n is a, c, g, or t
  misc_feature (1116)..(1117): n is a, c, g, or t
  misc_feature (1124)..(1125): n is a, c, g, or t
  misc_feature (1134)..(1134): n is a, c, g, or t
  misc_feature (1152)..(1153): n is a, c, g, or t
  misc_feature (1160)..(1160): n is a, c, g, or t
  misc_feature (1168)..(1168): n is a, c, g, or t
  misc_feature (1171)..(1171): n is a, c, g, or t
gcttcagcagcaagagcagcagctccagcaactccagcagctcctggcctccccgcagctgaccccggaacaccagactgttgtctaccagatgatccagcagatccagcagaaacgggagctgcagcgcctgcagatggctgggggctcccagctgcccatggccagcctgctggcaggaagctccaccccgctgctgtctgcgggtacccctggcctgctgcccacagcgtctgctccacccctgctgcccgctggagccctagtggctccctcgcttggcaacaacacaagtctcatggccgcagcagctgcagctgcagcagtagcagcagcaggcggacctccagtcctcactgcccagaccaaccccttcctcagcctgtcgggagcagagggcagtggcggtggccccaaaggagggaccgctgacaaaggagcctcagccaaccaggaaaaaggctaaatccacccttacccctcctgacccccccaagtggagggaacagatcctggcctgaggggtcctagcctggagcaggcgcctgcgcccagaccctggagagccttgacccagagcctgtgctgaggtccagggagtgtggagagctcctggtgtcgaggactgagactgagaggggagccccctccatctggcccccttccctttccgcactgtccgctttgtgaggctcagaggaaggacagtctgcaagcccgcctaggaggtccatcccnagcaaatgttttggaggtccccccananagcaaagtgggccatggcaaaantanggggttggttggacctgtcanatgaaaatggatcagcactttgaatgggaaaaattggaaggaaaagnccttggcctgtccctgcggggaaatnttttatggaaanaagggctggancccactttanctgnanttttttnccnacttgggnaaaatggaaaaaggaacccttgnantttttntnncatcccccccccagnnaaggggcnaaanttgannttttaaaaacccnnaaattttgggggctgnaaaagggnangaaaaaantaanttnancccagcctnttaaanttttgggccccttaaaggnaaaaaaggnaaggnngggaaanntttgccttntttgggcccccctttttnncaattgnaaataaangcnaaaggggaaa

SEQ ID NO: 146 - DNA, 856 bp, Homo sapiens
  misc_feature (529)..(529): n is a, c, g, or t
  misc_feature (718)..(718): n is a, c, g, or t
  misc_feature (728)..(728): n is a, c, g, or t
  misc_feature (746)..(746): n is a, c, g, or t
  misc_feature (752)..(752): n is a, c, g, or t
  misc_feature (784)..(784): n is a, c, g, or t
  misc_feature (794)..(795): n is a, c, g, or t
  misc_feature (817)..(817): n is a, c, g, or t
  misc_feature (843)..(843): n is a, c, g, or t
  misc_feature (846)..(846): n is a, c, g, or t
gggatgttccgcgccttcggccaccacgccgtgtcactgcttgatggcggcctccgccactggctgcgccagaacctcccgctcagctccggcaagagccaacctgctcccgccgagttccgcgctcagctcgaccccgccttcatcaagacctacgaggacatcaaggagaacctggaatcccggcgcttccaggtggtggactcccgagccactggcaggttccgcggcaccgagcccgagccccgagacggcattgaacctggccacatcccaggtaccgtgaacatccccttcacagacttcctgagccaggaggggctggagaagagccctgaggagatccgccatctgttccaggagaagaaagtggacctgtctaagccactggtggccacgtgtggctctggcgtcacagcctgccacgtggcactaggggcctacctctgcggcaagccagacgtgcccatctacgatggctcctgggtggagtggtacatgcgcgcccggcccgaggatgtcatctcanagggccgggggaagacccactgaagctgggcaggacacaggcgagctcaggtgatgccggccaccagcaatgcctggcctggtagctccgcttctgctttcaccaagagagtgtttcttcactcaactcaggtggcatttggggtgacatctcaaaggccaggaattccgttgacttgttggctgccantaggggcggnaggaaaggcggaggcganccctgnaggaaggaggccacaactccgagctgcccacntggtgctganntggggccccgcctcctttctgnttttattttttgaggaaaataaaaanaanccaagtgctt

SEQ ID NO: 147 - DNA, 980 bp, Homo sapiens
  misc_feature (235)..(235): n is a, c, g, or t
  misc_feature (402)..(402): n is a, c, g, or t
  misc_feature (785)..(785): n is a, c, g, or t
  misc_feature (794)..(794): n is a, c, g, or t
  misc_feature (801)..(801): n is a, c, g, or t
  misc_feature (810)..(810): n is a, c, g, or t
  misc_feature (819)..(819): n is a, c, g, or t
  misc_feature (824)..(824): n is a, c, g, or t
  misc_feature (843)..(843): n is a, c, g, or t
  misc_feature (851)..(851): n is a, c, g, or t
  misc_feature (857)..(857): n is a, c, g, or t
  misc_feature (874)..(874): n is a, c, g, or t
  misc_feature (887)..(887): n is a, c, g, or t
  misc_feature (890)..(890): n is a, c, g, or t
  misc_feature (892)..(892): n is a, c, g, or t
  misc_feature (895)..(895): n is a, c, g, or t
  misc_feature (899)..(899): n is a, c, g, or t
  misc_feature (902)..(902): n is a, c, g, or t
  misc_feature (915)..(915): n is a, c, g, or t
  misc_feature (923)..(923): n is a, c, g, or t
  misc_feature (934)..(934): n is a, c, g, or t
  misc_feature (936)..(936): n is a, c, g, or t
  misc_feature (942)..(943): n is a, c, g, or t
  misc_feature (954)..(954): n is a, c, g, or t
  misc_feature (960)..(960): n is a, c, g, or t
  misc_feature (962)..(962): n is a, c, g, or t
  misc_feature (966)..(966): n is a, c, g, or t
  misc_feature (968)..(968): n is a, c, g, or t
  misc_feature (975)..(975): n is a, c, g, or t
  misc_feature (977)..(977): n is a, c, g, or t
gaggatgtggggcagccgcggctgcaggcctgcctgcgggagatccgctgcctggcccggaagcggaggaactcacgggatggggacccgctgccctccagcctcagctgcaaggtgcacgtggcatcggtgaacaacttccccacggctgcgggcctggcctcctcagcggcgggctatgcctgcctagcctacaccctggcccgtgtctacggcgtggagagtgacctctcanaagtggctcgccggggctcaggcagcgcctgccggagcctgtatgggggctttgtggagtggcagatgggagagcaggccgacgggaaggacagcatcgctcggcaagtggcccccgagtcacactggcctgaactccgcgtgctcatccttgtggtgagcgctganaagaagctgacaggcagtaccgtgggcatgcgggccagtgtggagaccagccccctgcttcggttccgggccgagtccgtggtgcccgcgcgcatggcggagatggcccgctgcatccgggagcgagacttccccagcttcgcccagctgaccatgaaggacagcaaccagttccacgccacctgcctcgacaccttcccgcccatctcttacctcaatgccatctcctggcgcatcatccacctggtgcaccgcttcaacgcccaccacggggacaccaaggtggcgtacacctttgacgcgggccccaatgccgtgatcttcaccctggacgacactgtggctgaatttgtggctgctgtgtggcacggctttcccccagnctcgaatgnaaacacntttctgaangggctgcangtgangccggcccctctctcactnaacttcangctgcnctggccatggaacccanccccggtggggtnaananatnattntcnctcagtggggccnaggcctcnaatcctggatnanccctgnncccactctggntctgangncttncnaaaccantncta

SEQ ID NO: 148 - DNA, 697 bp, Homo sapiens
  misc_feature (674)..(678): n is a, c, g, or t
  misc_feature (680)..(697): n is a, c, g, or t
ggagcagtcaagatgtgtgacttcaccgaagaccagaccgcagagttcaaggaggccttccagctgtttgaccgaacaggtgatggcaagatcctgtacagccagtgtggggatgtgatgagggccctgggccagaaccctaccaacgccgaggtgctcaaggtcctggggaaccccaagagtgatgagatgaatgtgaaggtgctggactttgagcactttctgcccatgctgcagacagtggccaagaacaaggaccagggcacctatgaggattatgtcgaaggacttcgggtgtttgacaaggaaggaaatggcaccgtcatgggtgctgaaatccggcatgttcttgtcacactgggtgagaagatgacagaggaagaagtagagatgctggtggcagggcatgaggacagcaatggttgtatcaactatgaagcgtttgtgaggcatatcctgtcggggtgacgggcccatggggcggagctcgtccgcatggtgctgaatggctgaggaccttcccagtctccccagagtccgtgcctttccctgtgtgaattttgtatctagcctaaagtttccctaggctttcttgtctcagcaactttcccatcttgtctctcttggatgatgtttgccgtcagcattcaccaaataaacttgctctctgggcnnnnnannnnnnnnnnnnnnnnnn

SEQ ID NO: 149 - DNA, 1052 bp, Homo sapiens
  misc_feature (751)..(751): n is a, c, g, or t
  misc_feature (753)..(753): n is a, c, g, or t
  misc_feature (760)..(760): n is a, c, g, or t
  misc_feature (829)..(829): n is a, c, g, or t
  misc_feature (868)..(868): n is a, c, g, or t
  misc_feature (901)..(901): n is a, c, g, or t
  misc_feature (906)..(906): n is a, c, g, or t
  misc_feature (908)..(908): n is a, c, g, or t
  misc_feature (934)..(934): n is a, c, g, or t
  misc_feature (938)..(938): n is a, c, g, or t
  misc_feature (942)..(942): n is a, c, g, or t
  misc_feature (952)..(952): n is a, c, g, or t
  misc_feature (955)..(955): n is a, c, g, or t
  misc_feature (957)..(957): n is a, c, g, or t
  misc_feature (964)..(964): n is a, c, g, or t
  misc_feature (966)..(966): n is a, c, g, or t
  misc_feature (968)..(969): n is a, c, g, or t
  misc_feature (973)..(973): n is a, c, g, or t
  misc_feature (977)..(977): n is a, c, g, or t
  misc_feature (986)..(986): n is a, c, g, or t
  misc_feature (991)..(991): n is a, c, g, or t
  misc_feature (1007)..(1007): n is a, c, g, or t
  misc_feature (1013)..(1013): n is a, c, g, or t
  misc_feature (1018)..(1018): n is a, c, g, or t
  misc_feature (1025)..(1025): n is a, c, g, or t
  misc_feature (1040)..(1041): n is a, c, g, or t
  misc_feature (1043)..(1044): n is a, c, g, or t
gccagccccagtgcggacagcacggtgctgctcgccccatcagtgcaggactccgggagcctacacaactcctccagcggcgagtccacctactgcatgccccagaacgctggggacttgccctccccagacggcgactacgactacgaccaggatgactatgaggacggtgccatcacttccggcagcagcgtgaccttctccaactcctacggcagccagtggtcccccgactaccgctgctctgtggggacctacaacagctcgggtgcctaccggttcagctctgagggggcgcagtcctcgtttgaagatagtgaagaggactttgattccaggtttgatacagatgatgagctttcataccggcgtgactctgtgtacagctgtgtcactctgccgtatttccacagctttctgtacatgaaaggtggcctgatgaactcttggaaacgccgctggtgcgtcctcaaggatgaaaccttcttgtggttccgctccaagcaggaggccctcaagcaaggctggctccacaaaaaaggggggggctcctccacgctgtccaggagaaattggaagaagcgctggtttgtcctccgccagtccaagctgatgtactttgaaaacgacagcgaggagaagctcaagggcaccgtaaaagtgcgaacggcaaaagagatcatagataacaccaccaaggagaatgggatcgacatcattatggccgataggactttccacctgattgcanantccccanaaaaatgccagccagtggttcagcgtgctgagtcaggtccacgcgtccacggaacaggagatccagaanatgcatgatgagcaggcaacccacagatgctgtggcacntggatgtggggctgaatgattctgtgtgtgccnctganancctgaaaaacccaactcgttttgatntcanggcnaaccgggtgntgnantgaaacncnanncccngaanaaaagcccntgganaaccctgctgcaaagntccaangggancccaaanggagggccagaaatnntnntggaagaa

SEQ ID NO: 150 - DNA, 1028 bp, Homo sapiens
  misc_feature (689)..(689): n is a, c, g, or t
  misc_feature (743)..(743): n is a, c, g, or t
  misc_feature (745)..(745): n is a, c, g, or t
  misc_feature (800)..(800): n is a, c, g, or t
  misc_feature (802)..(802): n is a, c, g, or t
  misc_feature (806)..(806): n is a, c, g, or t
  misc_feature (808)..(808): n is a, c, g, or t
  misc_feature (834)..(835): n is a, c, g, or t
  misc_feature (843)..(843): n is a, c, g, or t
  misc_feature (846)..(846): n is a, c, g, or t
  misc_feature (857)..(857): n is a, c, g, or t
  misc_feature (883)..(883): n is a, c, g, or t
  misc_feature (892)..(892): n is a, c, g, or t
  misc_feature (900)..(901): n is a, c, g, or t
  misc_feature (908)..(908): n is a, c, g, or t
  misc_feature (912)..(912): n is a, c, g, or t
  misc_feature (917)..(917): n is a, c, g, or t
  misc_feature (928)..(928): n is a, c, g, or t
  misc_feature (932)..(932): n is a, c, g, or t
  misc_feature (940)..(940): n is a, c, g, or t
  misc_feature (944)..(944): n is a, c, g, or t
  misc_feature (954)..(954): n is a, c, g, or t
  misc_feature (958)..(960): n is a, c, g, or t
  misc_feature (962)..(962): n is a, c, g, or t
  misc_feature (972)..(972): n is a, c, g, or t
  misc_feature (975)..(975): n is a, c, g, or t
  misc_feature (981)..(981): n is a, c, g, or t
  misc_feature (988)..(988): n is a, c, g, or t
  misc_feature (995)..(995): n is a, c, g, or t
  misc_feature (1001)..(1002): n is a, c, g, or t
  misc_feature (1012)..(1012): n is a, c, g, or t
  misc_feature (1027)..(1028): n is a, c, g, or t
gcctacttgtcctccttgaagggctccaggcttcaccctgaagaactgggaggccctccactgaagaagctgaaacaagaggttggagaacagagtcaccctgaaatccagcagcctcccccaggccctgagtcctatgtacccccataccgccccagcctggaggaggacagcgccagcctgtctggggagagtctggatggacatttgcaggctgtggggtcatgtccaaggctgacgccgccccctgctgacctgcctctggcattgccagcccatgggctatggagccgacacatcctgcagcagacactgatggacgaggggctgcggctcgcccgcctcgtctcccacgaccgcgtgggccgcctcagcccctgtgtgcctgcgaagccacctctcgcagagttcgaggaagggctgctggacagatgtcctgccccaggaccccatcccgcgctggtggagggtcgcaggagcagcgtgaaagtggaggctgaggccagccggcagtgagggttggactggtgtcttcagacccaggacctcagacttctggctcacacagacccccacgctctccatccccggaatctagtcacaaccctggatccttcctctgcccttctcctgcctccccacctgctccatgggcataagactgtggggcttcaagcaataacaagcanaggcctggagagaggacacaaaggagggtgcgtggtgccctcacccctgcccanancgagggggcaaggactctgcctccagggcatctgggggttttccccttccctcananaaanantcccattctctttaggtttgcaccannggtgtgancanttggaactcanttttggacaagggggaaagggggaanttccctggnaaggtccnnctaaaantggnaacantttgccccccnaaantgggggcntggnaaaactgganctgnnncnttttcccctnccnttcccngtttttnggcttcngggttnnttctttaatnaatttaaaaagggtnn

SEQ ID NO: 151 - DNA, 806 bp, Homo sapiens
  misc_feature (737)..(737): n is a, c, g, or t
  misc_feature (782)..(782): n is a, c, g, or t
  misc_feature (784)..(787): n is a, c, g, or t
  misc_feature (791)..(792): n is a, c, g, or t
  misc_feature (794)..(795): n is a, c, g, or t
  misc_feature (797)..(798): n is a, c, g, or t
  misc_feature (800)..(800): n is a, c, g, or t
  misc_feature (802)..(806): n is a, c, g, or t
gcccacgcgtccggttccctgcacaaaatgcccggcgaagccacagaaaccgtccctgctacagagcaggagttgccgcagccccaggctgagacagggtctggaacagaatctgacagtgatgaatcagtaccagagcttgaagaacaggattccacccaggcaaccacacaacaagcccagctggcggcagcagctgaaatcgatgaagaaccagtcagtaaagcaaaacagagtcggagtgaaaagaaggcacggaaggctatgtccaaactgggtcttcggcaggttacaggagttactagagtcactatccggaaatctaagaatatcctctttgtcatcacaaaaccagatgtctacaagagccctgcttcagatacttacatagtttttggggaagccaagatcgaagatttatcccagcaagcacaactagcagctgctgagaaattcaaagttcaaggtgaagctgtctcaaacattcaagaaaacacacagactccaactgtacaagaggagagtgaagaggaagaggtcgatgaaacaggtgtagaagttaaggacatagaattggtcatgtcacaagcaaatgtgtcgagagcaaaggcagtccgagccctgaagaacaacagtaatgatattgtaaatgcgattatggaattaacaatgtaaccatatggaagcaactttttttggtgtctcaaaggagtaactgcagcttggtttgaaatttngtactgtttctatcataaataaagttatggcttcttgttggaaanannnnaaannannannanannnnn

SEQ ID NO: 152 - DNA, 1067 bp, Homo sapiens
  misc_feature (727)..(727): n is a, c, g, or t
  misc_feature (738)..(738): n is a, c, g, or t
  misc_feature (742)..(742): n is a, c, g, or t
  misc_feature (768)..(768): n is a, c, g, or t
  misc_feature (779)..(779): n is a, c, g, or t
  misc_feature (803)..(803): n is a, c, g, or t
  misc_feature (814)..(814): n is a, c, g, or t
  misc_feature (817)..(817): n is a, c, g, or t
  misc_feature (835)..(835): n is a, c, g, or t
  misc_feature (840)..(840): n is a, c, g, or t
  misc_feature (842)..(842): n is a, c, g, or t
  misc_feature (867)..(867): n is a, c, g, or t
  misc_feature (870)..(870): n is a, c, g, or t
  misc_feature (903)..(903): n is a, c, g, or t
  misc_feature (917)..(917): n is a, c, g, or t
  misc_feature (934)..(934): n is a, c, g, or t
  misc_feature (959)..(959): n is a, c, g, or t
  misc_feature (963)..(963): n is a, c, g, or t
  misc_feature (965)..(965): n is a, c, g, or t
  misc_feature (971)..(971): n is a, c, g, or t
  misc_feature (973)..(973): n is a, c, g, or t
  misc_feature (979)..(979): n is a, c, g, or t
  misc_feature (984)..(984): n is a, c, g, or t
  misc_feature (990)..(990): n is a, c, g, or t
  misc_feature (1003)..(1003): n is a, c, g, or t
  misc_feature (1015)..(1015): n is a, c, g, or t
  misc_feature (1017)..(1017): n is a, c, g, or t
  misc_feature (1021)..(1021): n is a, c, g, or t
  misc_feature (1026)..(1027): n is a, c, g, or t
  misc_feature (1030)..(1030): n is a, c, g, or t
  misc_feature (1032)..(1032): n is a, c, g, or t
  misc_feature (1036)..(1036): n is a, c, g, or t
  misc_feature (1040)..(1040): n is a, c, g, or t
  misc_feature (1042)..(1042): n is a, c, g, or t
  misc_feature (1060)..(1060): n is a, c, g, or t
  misc_feature (1062)..(1062): n is a, c, g, or t
  misc_feature (1066)..(1066): n is a, c, g, or t
ggcctcgaccacatggcctccagcattgagcgcatgggccagaccatggagcgcattggctctggcgtggagcgcatgggtgccggcatgggcttcggccttgagcgcatggccgctcccatcgaccgtgtgggccagaccattgagcgcatgggctctggcgtggagcgcatgggccctgccatcgagcgcatgggcctgagcatggagcgcatggtgcccgcaggtatgggagctggcctggagcgcatgggccccgtgatggatcgcatggccaccggcctggagcgcatgggcgccaacaatctggagcggatgggcctggagcgcatgggcgccaacagcctcgagcgcatgggcctggagcgcatgggtgccaacagcctcgagcgcatgggccccgccatgggcccggccctgggcgctggcattgagcgcatgggcctggccatgggtggcggtggcggtgccagctttgaccgtgccatcgagatggagcgtggcaacttcggaggaagcttcgcaggttcctttggtggagctggaggccatgctcctggggtggccaggaaggcctgccagatatttgtgagaaatctgccattcgatttcacatggaagatgctaaaggacaaattcaacgagtgcggccacgtgctgtacgccgacatcaagatggagaatgggaagtccaaggggtgtggtgtggttaagttcgagtccccanaagtggccganagancctgccggatgatgaatggcatgaanctgaatggccnaaaaattgacgttcgaattgatanaaacgcttaancanttgccttttttaacatcnatacnanacctctgaaattggaattttttctngtnaaccattttaatttgttggctggatgtataaanatgtttaaaaaatncagttgctttttggggnaatttgaattacttttttaagaacngggntncatttnantgtttncattnaaattncaatgggcccaantttttttttaantngggnatctnnttnanatcnaaananattttaaaaaaaaaaccngnttcng

SEQ ID NO: 153 - DNA, 1090 bp, Homo sapiens
  misc_feature (667)..(667): n is a, c, g, or t
  misc_feature (687)..(687): n is a, c, g, or t
  misc_feature (719)..(719): n is a, c, g, or t
  misc_feature (729)..(729): n is a, c, g, or t
  misc_feature (747)..(747): n is a, c, g, or t
  misc_feature (756)..(756): n is a, c, g, or t
  misc_feature (780)..(780): n is a, c, g, or t
  misc_feature (782)..(782): n is a, c, g, or t
  misc_feature (803)..(803): n is a, c, g, or t
  misc_feature (818)..(818): n is a, c, g, or t
  misc_feature (837)..(838): n is a, c, g, or t
  misc_feature (843)..(843): n is a, c, g, or t
  misc_feature (850)..(850): n is a, c, g, or t
  misc_feature (860)..(860): n is a, c, g, or t
  misc_feature (864)..(864): n is a, c, g, or t
  misc_feature (866)..(866): n is a, c, g, or t
  misc_feature (869)..(869): n is a, c, g, or t
  misc_feature (874)..(874): n is a, c, g, or t
  misc_feature (883)..(883): n is a, c, g, or t
  misc_feature (891)..(891): n is a, c, g, or t
  misc_feature (893)..(893): n is a, c, g, or t
  misc_feature (905)..(905): n is a, c, g, or t
  misc_feature (907)..(907): n is a, c, g, or t
  misc_feature (921)..(921): n is a, c, g, or t
  misc_feature (930)..(930): n is a, c, g, or t
  misc_feature (934)..(934): n is a, c, g, or t
  misc_feature (939)..(939): n is a, c, g, or t
  misc_feature (959)..(959): n is a, c, g, or t
  misc_feature (970)..(970): n is a, c, g, or t
  misc_feature (973)..(973): n is a, c, g, or t
  misc_feature (977)..(977): n is a, c, g, or t
  misc_feature (1002)..(1002): n is a, c, g, or t
  misc_feature (1008)..(1008): n is a, c, g, or t
  misc_feature (1038)..(1038): n is a, c, g, or t
  misc_feature (1044)..(1044): n is a, c, g, or t
  misc_feature (1046)..(1046): n is a, c, g, or t
  misc_feature (1049)..(1050): n is a, c, g, or t
  misc_feature (1053)..(1053): n is a, c, g, or t
  misc_feature (1068)..(1069): n is a, c, g, or t
  misc_feature (1075)..(1076): n is a, c, g, or t
  misc_feature (1078)..(1078): n is a, c, g, or t
gcggaccctcgacgctgcatgaggcaccactatgtggattctatcagtcacccattgtacaagtgtagctcaaagatggtgctcctggccaggtgcgaggggcactgcagccaggcgtcacgctccgagcctttggtgtcgttcagcactgtcctcaagcaacccttccgttcctcctgtcactgctgccggccccagacttccaagctgaaggcactgcggctgcgatgctcagggggcatgcgactcactgccacctaccggtacatcctctcctgtcactgcgaggaatgcaattcctgaggcccgctgctgtgtgtggcttctggatgggacaactgtagaggcagttcgaccagccagggaaagactggcaagaaaagagttaaggcaaaaaaggatgcaacaattctcccgggactctgcatattctagtaataaagactctacatgcttgttgacagagagagatactctgggaacttctttgcagttcccatctcctttctctggtacaatttcttttggttcattttcagattcaggcattttcccccttggctctcaatgctgtttgggtttccaacaattcagcattagtgggaaaaaagtgggccctcatacacaagcgtgtcaggctgtcagtgtttggtgcacgctggggaanaattttactttggaaagtanaaaagcccagcttttcctgggacatcttctgntattggtgangtttttttttacctttgncattttggnctaaggttgccattgctgctaaangntaaccgattttcaaaagtccnaaaaaccaagcatgngggaaaatgtttagctacnntttanctcccancccagcgaanctgnanttnaaaantaactaaanaaacagantncttttatgtgangnctggaaacttcttngacagctanaatnattanttccaaaaatgaactttttngaaagtaaaanccnccanaaaaaaattttttcccaagaaaggnttgttntcaaaaaaatttatgggaaaaaattttttnaagggnanccnnaantttttaaaaaatttnnccaaannanggaatcctgccc

SEQ ID NO: 154 - DNA, 1102 bp, Homo sapiens
  misc_feature (815)..(816): n is a, c, g, or t
  misc_feature (832)..(832): n is a, c, g, or t
  misc_feature (865)..(865): n is a, c, g, or t
  misc_feature (882)..(882): n is a, c, g, or t
  misc_feature (903)..(903): n is a, c, g, or t
  misc_feature (912)..(912): n is a, c, g, or t
  misc_feature (923)..(923): n is a, c, g, or t
  misc_feature (935)..(935): n is a, c, g, or t
  misc_feature (946)..(946): n is a, c, g, or t
  misc_feature (960)..(960): n is a, c, g, or t
  misc_feature (984)..(984): n is a, c, g, or t
  misc_feature (990)..(990): n is a, c, g, or t
  misc_feature (1007)..(1007): n is a, c, g, or t
  misc_feature (1009)..(1010): n is a, c, g, or t
  misc_feature (1012)..(1012): n is a, c, g, or t
  misc_feature (1014)..(1014): n is a, c, g, or t
  misc_feature (1016)..(1016): n is a, c, g, or t
  misc_feature (1019)..(1019): n is a, c, g, or t
  misc_feature (1035)..(1035): n is a, c, g, or t
  misc_feature (1040)..(1040): n is a, c, g, or t
  misc_feature (1046)..(1046): n is a, c, g, or t
  misc_feature (1049)..(1049): n is a, c, g, or t
  misc_feature (1061)..(1061): n is a, c, g, or t
  misc_feature (1064)..(1064): n is a, c, g, or t
  misc_feature (1078)..(1079): n is a, c, g, or t
  misc_feature (1082)..(1083): n is a, c, g, or t
  misc_feature (1091)..(1091): n is a, c, g, or t
  misc_feature (1093)..(1093): n is a, c, g, or t
  misc_feature (1096)..(1096): n is a, c, g, or t
  misc_feature (1099)..(1099): n is a, c, g, or t
ggcagtgtgcagtgcaaactgcgctatggaatgtggcatttcctacttggggataaagcaagcaaaagactgacagaacgcagcagagtgataactgtagatggcaatatatgtactggaaaaggcaaacttgcaaaagaaatagcagagaaactaggcttcaagcactttcctgaagcggggattcattatccagacagtaccacaggagatgggaagcccctcgccaccgactataatggcaactgtagtttggagaaattttacgatgatccgagaagcaatgatggcaacagttaccgcctgcagtcctggttgtacagcagtcgcctgctgcagtactcagatgccttggagcacttgctgaccacaggacaaggtgttgtgttggagcgctccatcttcagtgactttgtgttcctggaggcgatgtacaaccagggattcatccgaaagcagtgtgtggaccactacaacgaggtgaagagcgtcaccatctgcgattacctgcccccccacctggtgatttacatcgatgtgcccgttccagaggtccagaggcggattcagaagaaaggagatccacatgaaatgaagatcacctctgcctatctacaggacattgagaatgcctataagaaaacctttctccctgagatgagtgaaaaatgtgaggttttacagtattctgcaagggaagctcaagattcaaaaaaggtggtagaggacattgaatacctgaagttcgataaagggccgtggctcaagcaggacaatcgcactttataccacctgcgattactggttcaggatanntttgaggtgctgaatnacacaagcattcctatctttctcccggaagtcnccattggagctcatcanactgaccgtgtcttacatcanttcaaaaanctgccgggccncaagtacagccntgggtacaacnccgaggtgggaaanaagtggatctgggctgaaatgaangggccnccttttgctccagctgnanncnangnganggccaagctgcatcanccccnctcccnggnaccccaaaaacnttnaaatcgggggaggnnaannatgcaaantnccnagngga

SEQ ID NO: 155 - DNA, 911 bp, Homo sapiens
  misc_feature (668)..(668): n is a, c, g, or t
  misc_feature (674)..(679): n is a, c, g, or t
  misc_feature (681)..(699): n is a, c, g, or t
  misc_feature (732)..(732): n is a, c, g, or t
  misc_feature (768)..(768): n is a, c, g, or t
  misc_feature (786)..(786): n is a, c, g, or t
  misc_feature (800)..(800): n is a, c, g, or t
  misc_feature (828)..(828): n is a, c, g, or t
  misc_feature (841)..(841): n is a, c, g, or t
  misc_feature (847)..(847): n is a, c, g, or t
  misc_feature (880)..(880): n is a, c, g, or t
gacctaggccgcgggacccggacggaggtagaggccagggcagcgcgtccgggagcggagtccgcgcccgccgccgccatgccggacagctgggacaaggatgtgtaccctgagcccccgcgccgcacgccggtgcagcccaatcccatcgtctacatgatgaaagcgttcgacctcatcgtggaccgacccgtgaccctcgtgagagaatttatagagcggcagcacgcaaagaacaggtattactactaccaccggcagtaccgccgcgtgccagacatcactgagtgcaaggaggaggacatcatgtgcatgtatgaagccgaaatgcagtggaagagggactacaaagtcgaccaagaaattatcaacattatgcaggatcggctcaaagcctgtcagcagagggaaggacagaactaccagcagaactgtatcaaggaagtggagcagttcacccaggtggccaaggcctaccaggaccgctatcaggacctgggggcctacagttctgccaggaagtgcctggccaaacagaggcagaggatgctgcaagagagaaaagctgcaaaagaggccgccgctgccacctcctgaggcagctgtgggtgcccctgctgtgtggctctgtatgactgttgctgaaatataaagccctgcaacctganaaaaannnnnnannnnnnnnnnnnnnnnnnnaaagggcggccgctccctatagtgagtcgtatnaagcttaattagctgagcttggactcctgttgatanatccagtaatgacctcanaactcccttctggnatttgttcaaaacgctcggttgccgccngggcgtttttttntttggngaaaatcccaagcttagcttgggcgaaattttncggagcttaagggaagcttaaatgggaaaaa

SEQ ID NO: 156 - DNA, 887 bp, Homo sapiens
  misc_feature (777)..(777): n is a, c, g, or t
  misc_feature (817)..(817): n is a, c, g, or t
  misc_feature (855)..(856): n is a, c, g, or t
  misc_feature (866)..(868): n is a, c, g, or t
  misc_feature (870)..(873): n is a, c, g, or t
  misc_feature (877)..(887): n is a, c, g, or t
gcccacgcgtccgcgctcatcgagtccattgagggcaagcagggcaagccccgcctgaagccccccttccccgcagacgtgggagtgtttggctgccccacaactgtggccaacgtggagacagtggcagtgtcccccacaatctgccgccgtggaggtacctggtttgctggctttggcagagaacgcaactcaggcaccaaactattcaacatctctggccatgtcaaccacccttgcactgtggaggaggagatgtctgtgcccttgaaagaactgattgagaagcatgctgggggtgtcacgggcggctgggacaacctccttgctgtgatccctggcggctcgtctaccccactgatccccaagtctgtgtgtgagacggtgctgatggacttcgatgcgctggtgcaggcacagacaggcctgggcacagctgcggtgatcgtcatggaccgctcgacggacatcgtgaaagccatcgcccgcctcattgagttctataagcacgagagctgtggccagtgtaccccatgccgtgagggtgtggactggatgaacaaggtgatggcacgtttcgtgaggggggatgcccggccggccgagatcgactccctgtgggagatcagcaagcagatagaaggccatacgatttgtgctctgggtgacggggccgcctggcctgtgcagggtctgatccgccactttcggccggagctcgaggagcggatgcagcggtttgcccagcagcatcaggcccggcaggctgcctcttancccaccaccctggcctgctgtcctgcgtctatccatgtgnaatgctggacaataaagcgagtgctgcccaccctcccnnaaaaaaaaannnannnnaaannnnnnnnnnn

SEQ ID NO: 157 - DNA, 734 bp, Homo sapiens
  misc_feature (439)..(439): n is a, c, g, or t
  misc_feature (497)..(498): n is a, c, g, or t
  misc_feature (502)..(502): n is a, c, g, or t
  misc_feature (508)..(508): n is a, c, g, or t
  misc_feature (514)..(514): n is a, c, g, or t
  misc_feature (580)..(580): n is a, c, g, or t
  misc_feature (589)..(589): n is a, c, g, or t
  misc_feature (604)..(604): n is a, c, g, or t
  misc_feature (608)..(608): n is a, c, g, or t
  misc_feature (629)..(629): n is a, c, g, or t
  misc_feature (633)..(633): n is a, c, g, or t
  misc_feature (666)..(666): n is a, c, g, or t
  misc_feature (673)..(673): n is a, c, g, or t
  misc_feature (679)..(679): n is a, c, g, or t
  misc_feature (685)..(686): n is a, c, g, or t
  misc_feature (694)..(694): n is a, c, g, or t
  misc_feature (697)..(697): n is a, c, g, or t
  misc_feature (704)..(704): n is a, c, g, or t
  misc_feature (707)..(707): n is a, c, g, or t
  misc_feature (715)..(715): n is a, c, g, or t
  misc_feature (718)..(718): n is a, c, g, or t
  misc_feature (720)..(721): n is a, c, g, or t
  misc_feature (728)..(728): n is a, c, g, or t
  misc_feature (732)..(732): n is a, c, g, or t
  misc_feature (734)..(734): n is a, c, g, or t
gcggagatcctgcgctccggcaagcggccagacctagtgtcctacgtgcagactctgtgcaagggtctgtcgcagcccaccaccaatctggtggccggctgtctgcagctcaactctcgcaacttcctcacggagcaaggcgccgacggtgccggccgcttccacggctcgggcggcccgttcgccatgcacccctacccgtacccgtgctcgcgcctggcgggcgcacagtgccaggcggccggcggcctgggcggcggcgcggcgcacgccctgcggacccacggctactgcgccgcctacgagacgctgtatgcggcggcaggcggtggcggcgcgagcccggactacaacagctccgagtacgagggcccgctcagccccccgctctgtctcaatggcaacttctcactcaagcaggactcctcgcccgaccacnagaaaagctaccactactctatgcactactcggcgctgcccggttcgcggcccacggnncacnggctantcttcngctcgtcggctgtgcgcgggggcgtccactcggagaatctcttgtcttacgatatgcaccttcacnacgaccggngtcctcatgtacgangaanctcaatgcgttttttcataantganacttcgcaccggctcccttctttttctttttgncttttgnccgccncccttnntccccaanccnccagaancgncaatgganacncnnattcctncccncn

SEQ ID NO: 158 - DNA, 1007 bp, Homo sapiens
  misc_feature (647)..(647): n is a, c, g, or t
  misc_feature (683)..(683): n is a, c, g, or t
  misc_feature (711)..(711): n is a, c, g, or t
  misc_feature (723)..(723): n is a, c, g, or t
  misc_feature (747)..(747): n is a, c, g, or t
  misc_feature (751)..(751): n is a, c, g, or t
  misc_feature (773)..(773): n is a, c, g, or t
  misc_feature (798)..(798): n is a, c, g, or t
  misc_feature (801)..(801): n is a, c, g, or t
  misc_feature (813)..(813): n is a, c, g, or t
  misc_feature (823)..(823): n is a, c, g, or t
  misc_feature (837)..(837): n is a, c, g, or t
  misc_feature (842)..(842): n is a, c, g, or t
  misc_feature (845)..(845): n is a, c, g, or t
  misc_feature (868)..(868): n is a, c, g, or t
  misc_feature (880)..(880): n is a, c, g, or t
  misc_feature (882)..(882): n is a, c, g, or t
  misc_feature (889)..(889): n is a, c, g, or t
  misc_feature (893)..(893): n is a, c, g, or t
  misc_feature (895)..(895): n is a, c, g, or t
  misc_feature (903)..(903): n is a, c, g, or t
  misc_feature (912)..(912): n is a, c, g, or t
  misc_feature (915)..(915): n is a, c, g, or t
  misc_feature (920)..(920): n is a, c, g, or t
  misc_feature (931)..(931): n is a, c, g, or t
  misc_feature (939)..(939): n is a, c, g, or t
  misc_feature (941)..(941): n is a, c, g, or t
  misc_feature (943)..(943): n is a, c, g, or t
  misc_feature (945)..(945): n is a, c, g, or t
  misc_feature (954)..(954): n is a, c, g, or t
  misc_feature (961)..(961): n is a, c, g, or t
  misc_feature (966)..(966): n is a, c, g, or t
  misc_feature (977)..(977): n is a, c, g, or t
  misc_feature (982)..(982): n is a, c, g, or t
  misc_feature (985)..(986): n is a, c, g, or t
  misc_feature (989)..(989): n is a, c, g, or t
  misc_feature (998)..(998): n is a, c, g, or t
  misc_feature (1006)..(1006): n is a, c, g, or t
gtgcagagcaatgacgaggtgttggctgaggtgacttcgtgggacctgcccccgttgactgaccgctaccgcagggcctgccagagcctggggcaaggggagcaccaacaggtgctgcaggccgtggagctccagggcttgggcctctcgttcagcgcctgctccctggccctggaccaggcccagcttacacccctgctgcgggccctcaagctgcacacagcactccgggagctgcgcctggcagggaaccggctgggggacaagtgtgtggctgagctggtggctgccctgggcaccatgcccagcctggccctccttgacctctcctccaatcacctgggtcccgaaggcctgcgccagcttgccatggggctcccaggccaagccaccttgcagagtttggaggagctggacttaagcatgaaccccctgggggacggctgtggccagtccctggcctccctcctgcacgcctgccccttactcagcaccctgcgcctgcaggcgtgtggcttcggccccagcttctttctgagccaccagacagcactgggtagtgctttccaagatgctgagcacctgaagaccctgtccctgtcctacaacgccctgggagcccctgccctggccaggaccctgcagancctgcccgccggcaccctcctgcacttaaagctcanctccgtggcagccggcaagggtgattcngacctcatggancctgtattccgatacctggccaangaangctgtgctctaacccacctgancctgtctgcaaaccacctggggganaangctgttaaaaanctgtgcaaangtctctctctgtgnccctncantcatctcactggatttgtctgcnaaccctgaaatnanctgtgcnactngnaaaactcntgtccaccntcnaaaancggccccaagncttaactncntngnctgtcaggntgccccntcaanggtccctgggnctggnctnnggnaaaaaaaancccccaant

SEQ ID NO: 159 - DNA, 980 bp, Homo sapiens
  misc_feature (4)..(4): n is a, c, g, or t
  misc_feature (12)..(12): n is a, c, g, or t
  misc_feature (14)..(14): n is a, c, g, or t
  misc_feature (37)..(37): n is a, c, g, or t
  misc_feature (41)..(41): n is a, c, g, or t
  misc_feature (98)..(98): n is a, c, g, or t
  misc_feature (145)..(145): n is a, c, g, or t
  misc_feature (159)..(159): n is a, c, g, or t
  misc_feature (162)..(163): n is a, c, g, or t
  misc_feature (181)..(181): n is a, c, g, or t
  misc_feature (183)..(183): n is a, c, g, or t
  misc_feature (188)..(188): n is a, c, g, or t
  misc_feature (193)..(193): n is a, c, g, or t
  misc_feature (197)..(197): n is a, c, g, or t
  misc_feature (206)..(206): n is a, c, g, or t
  misc_feature (221)..(221): n is a, c, g, or t
  misc_feature (233)..(234): n is a, c, g, or t
  misc_feature (261)..(261): n is a, c, g, or t
  misc_feature (270)..(270): n is a, c, g, or t
  misc_feature (275)..(275): n is a, c, g, or t
  misc_feature (285)..(285): n is a, c, g, or t
  misc_feature (287)..(287): n is a, c, g, or t
  misc_feature (289)..(289): n is a, c, g, or t
  misc_feature (314)..(314): n is a, c, g, or t
  misc_feature (320)..(320): n is a, c, g, or t
  misc_feature (361)..(361): n is a, c, g, or t
  misc_feature (394)..(394): n is a, c, g, or t
  misc_feature (462)..(462): n is a, c, g, or t
  misc_feature (476)..(477): n is a, c, g, or t
  misc_feature (484)..(484): n is a, c, g, or t
  misc_feature (487)..(487): n is a, c, g, or t
  misc_feature (495)..(495): n is a, c, g, or t
  misc_feature (504)..(504): n is a, c, g, or t
  misc_feature (515)..(515): n is a, c, g, or t
  misc_feature (529)..(530): n is a, c, g, or t
  misc_feature (547)..(547): n is a, c, g, or t
  misc_feature (556)..(556): n is a, c, g, or t
  misc_feature (559)..(559): n is a, c, g, or t
  misc_feature (596)..(596): n is a, c, g, or t
  misc_feature (600)..(600): n is a, c, g, or t
  misc_feature (607)..(607): n is a, c, g, or t
  misc_feature (627)..(627): n is a, c, g, or t
  misc_feature (630)..(630): n is a, c, g, or t
  misc_feature (632)..(632): n is a, c, g, or t
  misc_feature (635)..(635): n is a, c, g, or t
  misc_feature (645)..(645): n is a, c, g, or t
  misc_feature (647)..(647): n is a, c, g, or t
  misc_feature (666)..(666): n is a, c, g, or t
  misc_feature (668)..(669): n is a, c, g, or t
  misc_feature (673)..(673): n is a, c, g, or t
  misc_feature (679)..(679): n is a, c, g, or t
  misc_feature (689)..(689): n is a, c, g, or t
  misc_feature (697)..(698): n is a, c, g, or t
  misc_feature (703)..(703): n is a, c, g, or t
  misc_feature (723)..(723): n is a, c, g, or t
  misc_feature (727)..(727): n is a, c, g, or t
  misc_feature (730)..(731): n is a, c, g, or t
  misc_feature (745)..(745): n is a, c, g, or t
  misc_feature (747)..(747): n is a, c, g, or t
  misc_feature (756)..(756): n is a, c, g, or t
  misc_feature (764)..(764): n is a, c, g, or t
  misc_feature (788)..(788): n is a, c, g, or t
  misc_feature (795)..(795): n is a, c, g, or t
  misc_feature (801)..(801): n is a, c, g, or t
  misc_feature (814)..(814): n is a, c, g, or t
  misc_feature (817)..(818): n is a, c, g, or t
  misc_feature (828)..(828): n is a, c, g, or t
  misc_feature (830)..(830): n is a, c, g, or t
  misc_feature (843)..(843): n is a, c, g, or t
  misc_feature (845)..(845): n is a, c, g, or t
  misc_feature (854)..(854): n is a, c, g, or t
  misc_feature (863)..(863): n is a, c, g, or t
  misc_feature (875)..(875): n is a, c, g, or t
  misc_feature (886)..(886): n is a, c, g, or t
  misc_feature (912)..(912): n is a, c, g, or t
  misc_feature (915)..(916): n is a, c, g, or t
  misc_feature (918)..(918): n is a, c, g, or t
  misc_feature (923)..(923): n is a, c, g, or t
  misc_feature (926)..(926): n is a, c, g, or t
  misc_feature (934)..(934): n is a, c, g, or t
  misc_feature (951)..(951): n is a, c, g, or t
  misc_feature (953)..(953): n is a, c, g, or t
  misc_feature (966)..(966): n is a, c, g, or t
  misc_feature (977)..(977): n is a, c, g, or t
gggnaatggcgncngcctcggatgaactgcatcatcntctnctggatacatccttcctacgtgttgcttgcaaggtgttcctggaatgctgcatttantgggtaagattctcttttcgaaatcctccatggacacagcccattgngagaagtgaggtgntcnngtactccctgcagaagcngncatanacggngtcncggaccggncggcaggtgttgggngagcgcaggcanngagcccccaactgaggacccagctccnagccctggncggcngtatcatcangngntcctgtgcatctcggccagcacggnagccantgccgcgcaggaatgtggggtcccctgtgttccctcgccanacgagcacttgtcaaggtcagtgaggggaccantagacccccggaaaagcagtaccgacaatgactcaatataccagatcccttcccaacccctttgcacnggtcccactaaagnncaggatnaanagaggagnggggatagnggatagcaganccctgacatctggnnataggcaccgcattctnatctggacnaantcgggacagacaccatcacagccccagaagcaagggncatnccagcangccccaccatgataaatcanaanancgnaccagccagnanaatgtacattctgacatcncnngccnacgccntgaatcttgntgcagcannaaccncgtgcctgtgtggcgggacngganggnncagttgatgaaagnangaggcttanaaaatacngtggggccctctcgctgtccttgnccagggnacttgnattccaacctccnctnnatttgctctntnaaattcccctttncncctcactgnctcccaagnccaccctaatcnaaaataagggnccccttgaattggaactattcaaccnctnnantaaangantccccccntttacaaaaaaactttnantaaaccccctttnccctcaagaanttt

SEQ ID NO: 160 - DNA, 665 bp, Homo sapiens
  misc_feature (586)..(586): n is a, c, g, or t
  misc_feature (616)..(616): n is a, c, g, or t
  misc_feature (626)..(626): n is a, c, g, or t
  misc_feature (628)..(628): n is a, c, g, or t
  misc_feature (637)..(637): n is a, c, g, or t
  misc_feature (640)..(640): n is a, c, g, or t
  misc_feature (643)..(643): n is a, c, g, or t
  misc_feature (647)..(648): n is a, c, g, or t
  misc_feature (652)..(653): n is a, c, g, or t
  misc_feature (661)..(661): n is a, c, g, or t
  misc_feature (665)..(665): n is a, c, g, or t
gccccgatttcccgcaggaccatggccaacctggagcgcaccttcatcgccatcaagccggacggcgtgcagcgcggcctggtgggcgagatcatcaagcgcttcgagcagaagggattccgcctcgtggccatgaagttcctccgggcctctgaagaacacctgaagcagcactacattgacctgaaagaccgaccattcttccctgggctggtgaagtacatgaactcagggccggttgtggccatggtctgggaggggctgaacgtggtgaagacaggccgagtgatgcttggggagaccaatccagcagattcaaagccaggcaccattcgtggggacttctgcattcaggttggcaggaacatcattcatggcagtgattcagtaaaaagtgctgaaaaagaaatcagcctatggtttaagcctgaagaactggttgactacaagtcttgtgctcatgactgggtctatgaataagaggtggacacaacagcagtctccttcagcacggcgtggtgtgtccctggacacagctcttcattccattgacttagaggcaacaggattgatcattcttttatanagcatatttgcccaataaagcttttggaanccggaaaacnanaataaaaanaanccnctannatannaaaaaatntatn

SEQ ID NO: 161 - DNA, 1091 bp, Homo sapiens
  misc_feature (771)..(771): n is a, c, g, or t
  misc_feature (809)..(810): n is a, c, g, or t
  misc_feature (818)..(818): n is a, c, g, or t
  misc_feature (857)..(857): n is a, c, g, or t
  misc_feature (866)..(866): n is a, c, g, or t
  misc_feature (891)..(891): n is a, c, g, or t
  misc_feature (893)..(893): n is a, c, g, or t
  misc_feature (905)..(905): n is a, c, g, or t
  misc_feature (917)..(917): n is a, c, g, or t
  misc_feature (930)..(930): n is a, c, g, or t
  misc_feature (932)..(934): n is a, c, g, or t
  misc_feature (939)..(939): n is a, c, g, or t
  misc_feature (943)..(943): n is a, c, g, or t
  misc_feature (948)..(948): n is a, c, g, or t
  misc_feature (950)..(950): n is a, c, g, or t
  misc_feature (955)..(955): n is a, c, g, or t
  misc_feature (964)..(964): n is a, c, g, or t
  misc_feature (970)..(970): n is a, c, g, or t
  misc_feature (989)..(989): n is a, c, g, or t
  misc_feature (1008)..(1008): n is a, c, g, or t
  misc_feature (1020)..(1020): n is a, c, g, or t
  misc_feature (1022)..(1022): n is a, c, g, or t
  misc_feature (1048)..(1048): n is a, c, g, or t
  misc_feature (1054)..(1054): n is a, c, g, or t
  misc_feature (1056)..(1056): n is a, c, g, or t
  misc_feature (1062)..(1062): n is a, c, g, or t
  misc_feature (1069)..(1069): n is a, c, g, or t
  misc_feature (1080)..(1080): n is a, c, g, or t
  misc_feature (1087)..(1087): n is a, c, g, or t
  misc_feature (1089)..(1090): n is a, c, g, or t
ggccgccacccgatggaagattcgatggacatggacatgagccccctgaggccccagaactatcttttcggttgtgaactaaaggccgacaaagattatcactttaaggtggataatgatgaaaatgagcaccagttatctttaagaacggtcagtttaggggctggtgcaaaggatgagttgcacattgttgaagcagaggcaatgaattacgaaggcagtccaattaaagtaacactggcaactttgaaaatgtctgtacagccaacggtttcccttgggggctttgaaataacaccaccagtggtcttaaggttgaagtgtggttcagggccagtgcatattagtggacagcacttagtagctgtggaggaagatgcagagtcagaagatgaagaggaggaggatgtgaaactcttaagtatatctggaaagcggtctgcccctggaggtggtagcaaggttccacagaaaaaagtaaaacttgctgctgatgaagatgatgacgatgatgatgaagaggatgatgatgaagatgatgatgatgatgattttgatgatgaggaagctgaagaaaaagcgccagtgaagaaatctatacgagatactccagccaaaaatgcacaaaagtcaaatcagaatggaaaagactcaaaaccatcatcaacaccaagatcaaaaggacaagaatccttcaagaaacaggaaaaaactcctaaaacaccaaaaggacctagttctgtagaagacattaaagcaaaaatgcaagcnagtatagaaaaaggtggttctccttccccaaagtggannccaattcntcaattatgtgaagaattgcttccggatgactgaccaanaggctatcnagatctctggcagtggaggaagtcncnttaaaaaaatantttaaacaattngttaaaaaatttncnnncttanttcntttcngnaacanttgaaatcnggctgncctttttaaaaggcaaaangaaaactttccccaccggnttgaaaaatgtngnccaggtctattgccaaaaatggttgnccaaangnccgttnatttttnaaaaaggaacnccccccntnnc

SEQ ID NO: 162 - DNA, 1152 bp, Homo sapiens
  misc_feature (753)..(753): n is a, c, g, or t
  misc_feature (768)..(768): n is a, c, g, or t
  misc_feature (823)..(823): n is a, c, g, or t
  misc_feature (838)..(838): n is a, c, g, or t
  misc_feature (846)..(846): n is a, c, g, or t
  misc_feature (855)..(855): n is a, c, g, or t
  misc_feature (865)..(865): n is a, c, g, or t
  misc_feature (873)..(873): n is a, c, g, or t
  misc_feature (901)..(902): n is a, c, g, or t
  misc_feature (909)..(909): n is a, c, g, or t
  misc_feature (927)..(927): n is a, c, g, or t
  misc_feature (934)..(934): n is a, c, g, or t
  misc_feature (955)..(955): n is a, c, g, or t
  misc_feature (973)..(973): n is a, c, g, or t
  misc_feature (987)..(987): n is a, c, g, or t
  misc_feature (993)..(993): n is a, c, g, or t
  misc_feature (1000)..(1000): n is a, c, g, or t
  misc_feature (1017)..(1017): n is a, c, g, or t
  misc_feature (1029)..(1029): n is a, c, g, or t
  misc_feature (1031)..(1032): n is a, c, g, or t
  misc_feature (1037)..(1037): n is a, c, g, or t
  misc_feature (1040)..(1040): n is a, c, g, or t
  misc_feature (1043)..(1043): n is a, c, g, or t
  misc_feature (1056)..(1056): n is a, c, g, or t
  misc_feature (1067)..(1068): n is a, c, g, or t
  misc_feature (1072)..(1072): n is a, c, g, or t
  misc_feature (1094)..(1094): n is a, c, g, or t
  misc_feature (1096)..(1098): n is a, c, g, or t
  misc_feature (1109)..(1110): n is a, c, g, or t
  misc_feature (1123)..(1123): n is a, c, g, or t
  misc_feature (1125)..(1125): n is a, c, g, or t
  misc_feature (1130)..(1131): n is a, c, g, or t
  misc_feature (1137)..(1137): n is a, c, g, or t
  misc_feature (1144)..(1144): n is a, c, g, or t
  misc_feature (1149)..(1149): n is a, c, g, or t
gggaacggatatggtttcatcaacaggaatgacaccaaggaagatgtatttgtacaccagactgccataaagaagaataaccccaggaagtaccttcgcagtgtaggagatggagagactgtggagtttgatgttgttgaaggagaaaagggtgcggaggcagcaaatgttacaggtcctggtggtgttccagttcaaggcagtaaatatgcagcagaccgtaaccattatagacgctatccacgtcgtaggggtcctccacgcaattaccagcaaaattaccagaatagtgagagtggggaaaagaacgagggatcggagagtgctcccgaaggccaggcccaacaacgccggccctaccgcaggcgaaggttcccaccttactacatgcggagaccctatgggcgtcgaccacagtattccaaccctcctgtgcagggagaagtgatggagggtgctgacaaccagggtgcaggagaacaaggtagaccagtgaggcagaatatgtatcggggatatagaccacgattccgcaggggccctcctcgccaaagacagcctagagaggacggcaatgaagaagataaagaaaatcaaggagatgagacccaaggtcagcagccacctcaacgtcggtaccgccgcaacttcaattaccgacgcagacgcccagaaaaccctaaaccacaagatggcaaagagacaaaagcagccgatccaccagctgagaattcgtccgctcccgaggctgancagggcggggctgantaaatgccggcttaccatctctaccatcatccgggtttagtcatccaacaagaanaaatatgaaattccngcaataanaaatgaacnaaaagatggnagctgaanacctaaagtgcttgcttttttgcccgtnnaccaaanaaataaaacttatctgcnttatctntgccgcatggggttttttatnatttttaccttaaagaangtcccttttttggnaaaaanaaccggntttttttaaaaaagccngggttttttccnannccccnttnaanggtttttaaaatnttttcatattnngggncaagttgaaatttttaaaaacntnnntttttaatttnnaaaaaaaatttancnccttnntttttncaaaaanccaanaaa

SEQ ID NO: 163 - DNA, 923 bp, Homo sapiens
  misc_feature (707)..(707): n is a, c, g, or t
  misc_feature (776)..(776): n is a, c, g, or t
  misc_feature (786)..(787): n is a, c, g, or t
  misc_feature (803)..(803): n is a, c, g, or t
  misc_feature (817)..(817): n is a, c, g, or t
  misc_feature (824)..(824): n is a, c, g, or t
  misc_feature (829)..(829): n is a, c, g, or t
  misc_feature (833)..(834): n is a, c, g, or t
  misc_feature (836)..(836): n is a, c, g, or t
  misc_feature (841)..(841): n is a, c, g, or t
  misc_feature (845)..(845): n is a, c, g, or t
  misc_feature (850)..(850): n is a, c, g, or t
  misc_feature (855)..(855): n is a, c, g, or t
  misc_feature (860)..(860): n is a, c, g, or t
  misc_feature (867)..(867): n is a, c, g, or t
  misc_feature (878)..(878): n is a, c, g, or t
  misc_feature (880)..(880): n is a, c, g, or t
  misc_feature (890)..(890): n is a, c, g, or t
  misc_feature (893)..(893): n is a, c, g, or t
  misc_feature (901)..(901): n is a, c, g, or t
  misc_feature (915)..(915): n is a, c, g, or t
  misc_feature (919)..(919): n is a, c, g, or t
  misc_feature (921)..(921): n is a, c, g, or t
gcccacgcgtccgcccacgcgtccgaggctagcctgcgagccacctcctctactcagtctctagctcgcctgggttctcccgattatggcaactcagccctgctcagcttgcctggctaccgccccaccactcgcagttctgctcgtcgttcccaggccggggtgtccagtggggcccctccaggaaggaacagcttctacatgggcacttgccaggatgagcctgagcagctggatgactggaaccgcattgcagagctgcagcagcgcaatcgagtgtgccccccacatctgaagacctgctatcccctggagtccaggccttccctgagcctgggcaccatcacagatgaggagatgaaaactggagacccccaagagaccctgcgccgagccagcatgcagccaatccagatagccgagggcactggcatcaccacccggcagcagcgcaaacgggtctccctagagccccaccagggccctggaactcctgagtctaagaaggccaccagctgtttcccacgccccatgactccccgagaccgacatgaagggcgcaaacagagcactactgaggcccagaagaaagcagctccagcttctactaaacaggctgaccggcgccagtcgatggccttcagcatcctcaacacacccaagaagctagggaacagccttctgcggcggggagcctcaaagaaggncctgtccaaggcttcccccaacactcgcagtggaacccgccgttctccgcgcattgccaccaccacagncagcgccgcnntgctgccgccattggngccacccctcgagncaagggnaaggnaaannantaaangggncaatnaccantgagnggcccanctgtgtccccnangctgccgtanctnggtctccncccaaatgtccctntaangnct

SEQ ID NO: 164 - DNA, 1227 bp, Homo sapiens
  misc_feature (736)..(736): n is a, c, g, or t
  misc_feature (740)..(740): n is a, c, g, or t
  misc_feature (751)..(751): n is a, c, g, or t
  misc_feature (754)..(754): n is a, c, g, or t
  misc_feature (793)..(793): n is a, c, g, or t
  misc_feature (814)..(814): n is a, c, g, or t
  misc_feature (880)..(880): n is a, c, g, or t
  misc_feature (884)..(884): n is a, c, g, or t
  misc_feature (889)..(889): n is a, c, g, or t
  misc_feature (891)..(891): n is a, c, g, or t
  misc_feature (893)..(893): n is a, c, g, or t
  misc_feature (900)..(900): n is a, c, g, or t
  misc_feature (924)..(924): n is a, c, g, or t
  misc_feature (926)..(926): n is a, c, g, or t
  misc_feature (929)..(930): n is a, c, g, or t
  misc_feature (944)..(944): n is a, c, g, or t
  misc_feature (960)..(960): n is a, c, g, or t
  misc_feature (966)..(966): n is a, c, g, or t
  misc_feature (971)..(971): n is a, c, g, or t
  misc_feature (995)..(995): n is a, c, g, or t
  misc_feature (1002)..(1002): n is a, c, g, or t
  misc_feature (1005)..(1005): n is a, c, g, or t
  misc_feature (1013)..(1013): n is a, c, g, or t
  misc_feature (1017)..(1017): n is a, c, g, or t
  misc_feature (1021)..(1021): n is a, c, g, or t
  misc_feature (1024)..(1024): n is a, c, g, or t
  misc_feature (1046)..(1046): n is a, c, g, or t
  misc_feature (1048)..(1048): n is a, c, g, or t
  misc_feature (1052)..(1052): n is a, c, g, or t
  misc_feature (1060)..(1061): n is a, c, g, or t
  misc_feature (1068)..(1068): n is a, c, g, or t
  misc_feature (1096)..(1096): n is a, c, g, or t
  misc_feature (1099)..(1099): n is a, c, g, or t
  misc_feature (1104)..(1104): n is a, c, g, or t
  misc_feature (1122)..(1122): n is a, c, g, or t
  misc_feature (1124)..(1124): n is a, c, g, or t
  misc_feature (1130)..(1130): n is a, c, g, or t
  misc_feature (1136)..(1137): n is a, c, g, or t
  misc_feature (1141)..(1141): n is a, c, g, or t
  misc_feature (1149)..(1149): n is a, c, g, or t
  misc_feature (1153)..(1153): n is a, c, g, or t
  misc_feature (1157)..(1158): n is a, c, g, or t
  misc_feature (1164)..(1164): n is a, c, g, or t
  misc_feature (1216)..(1216): n is a, c, g, or t
  misc_feature (1218)..(1218): n is a, c, g, or t
  misc_feature (1223)..(1223): n is a, c, g, or t
ggagcagcggcggcggcgcggagagacgcagcggaggttttcctggtttcggaccccagcggccggatggtgaaatcctccctgcagcggatcctcaatagccactgcttcgccagagagaaggaaggggataaacccagcgccaccatccacgccagccgcaccatgccgctcctaagcctgcacagccgcggcggcagcagcagtgagagttccagggtctccctccactgctgtagtaacccgggtccggggcctcggtggtgctcctgatgcccctcacccacccctgaagatcccaggtgggcgagggaatagtcagagggatcacaatctttcagctaacttattctactccgatgatcggctgaatgtaacagaggaactaacgtccaacgacaagacgaggattctcaacgtccagtccaggctcacagacgccaaacgcattaactggcgaacagtgctgagtggcggcagcctctacatcgagatcccgggcggcgcgctgcccgaggggagcaaggacagctttgcagttctcctggagttcgctgaggagcagctgcgagccgaccatgtcttcatttgcttccacaagaaccgcgaggacagagccgccttgctccgaaccttcagctttttgggctttgagattgtgagaccggggcatccccttgtccccaagagacccgacgcttgcttcatggcctacacgttcgagagagagtcttcngganaagaggaagantanggccgcctcggggctgggcatccggccccctggggccanccccttgtcagccgggtgggntagaaaccgtaaactccctcatctcgcctggggtttgtccgcatgttgtaatcgtgcaaataaacnctcnctccnantnagcggtnttatttcttgaaattaaaaattgngnttnnggaaactgaaaatnttgctttaattctaanaaaaanttttntttttaaaaaaaaaaaaaaggggngcccccnccntaaaggangccnaatnaancttaattagctgaacttggacncngttnaaaaatcnnaaatganccccaaactcccttggattttttcaaanccncggtncccccgggggtttttttngngaaatnaacttnnttgngaattttntggnccanngaactnaagggaaaaaacccgggaatccccgttaattccagggcccaaaaaattttgngnttttnattt

SEQ ID NO: 165 - DNA, 1008 bp, Homo sapiens
  misc_feature (825)..(825): n is a, c, g, or t
  misc_feature (867)..(867): n is a, c, g, or t
  misc_feature (869)..(869): n is a, c, g, or t
  misc_feature (887)..(887): n is a, c, g, or t
  misc_feature (898)..(898): n is a, c, g, or t
  misc_feature (914)..(914): n is a, c, g, or t
  misc_feature (917)..(917): n is a, c, g, or t
  misc_feature (926)..(926): n is a, c, g, or t
  misc_feature (954)..(954): n is a, c, g, or t
  misc_feature (965)..(965): n is a, c, g, or t
  misc_feature (975)..(975): n is a, c, g, or t
  misc_feature (978)..(978): n is a, c, g, or t
  misc_feature (988)..(988): n is a, c, g, or t
  misc_feature (990)..(990): n is a, c, g, or t
  misc_feature (994)..(995): n is a, c, g, or t
  misc_feature (1008)..(1008): n is a, c, g, or t
gtggcgatgggactaatgtgcggacgccgggagcttctgcgcttgctacagtccgggcgtcgggtccacagcgtcgcagggccctcgcaatggcttgggaaaccgctgaccacacggctcctattcccagtagccccgtgctgctgtcgcccacactacctcttccttgcggcttccggcccccgcagcctcagtacctctgctatctcttttgcagaagtccaggttcaggcccctcctgttgttgctgcaactccctcacccacagcagtacctgaggtggcttctggagagactgcagatgtagtccaaactgctgcagagcagagcttcgctgaactggggctggggtcatacaccccagtgggactgatccagaatttactggaatttatgcatgttgatctgggcctaccttggtggggggccattgctgcatgtacagtctttgcccgctgcctgatttttcctctcatcgtgacgggccagcgagaggcagccaggatccacaatcacttgccagagatccagaagttttccagtcgaatcagagaggccaagttagcaggagaccatattgagtattacaaggcttcctcggagatggcactttaccagaaaaaacatggtattaaactctataaacctctcattctcctttacgacagacctttacccacaaccctctcctacaacctggaaaggataaccctcccaatatccctagcagcagcagcaaaccaaagtcaaagtatccctggcacgacacacttggctgacttatgttctgtgcgcattctggcaggaattctgtctctttcaaanactcatcctcaaaaaaaaacttgacactgtgtccttgccccnantcctaggaactgtggcanacaaagatgtncattttaaaaacgganttncatgaaacnctcttgtaatttatgttttaaaaaaaancactggggtanccaagtgatnttnccaattccananttannaaacctctgtacn

SEQ ID NO: 166 - DNA, 1081 bp, Homo sapiens
  misc_feature (698)..(698): n is a, c, g, or t
  misc_feature (711)..(711): n is a, c, g, or t
  misc_feature (794)..(794): n is a, c, g, or t
  misc_feature (841)..(841): n is a, c, g, or t
  misc_feature (866)..(866): n is a, c, g, or t
  misc_feature (871)..(871): n is a, c, g, or t
  misc_feature (881)..(881): n is a, c, g, or t
  misc_feature (906)..(906): n is a, c, g, or t
  misc_feature (913)..(913): n is a, c, g, or t
  misc_feature (928)..(928): n is a, c, g, or t
  misc_feature (949)..(950): n is a, c, g, or t
  misc_feature (952)..(952): n is a, c, g, or t
  misc_feature (955)..(956): n is a, c, g, or t
  misc_feature (962)..(962): n is a, c, g, or t
  misc_feature (964)..(964): n is a, c, g, or t
  misc_feature (968)..(968): n is a, c, g, or t
  misc_feature (973)..(973): n is a, c, g, or t
  misc_feature (984)..(985): n is a, c, g, or t
  misc_feature (987)..(987): n is a, c, g, or t
  misc_feature (994)..(994): n is a, c, g, or t
  misc_feature (998)..(998): n is a, c, g, or t
  misc_feature (1007)..(1007): n is a, c, g, or t
  misc_feature (1012)..(1012): n is a, c, g, or t
  misc_feature (1048)..(1049): n is a, c, g, or t
  misc_feature (1054)..(1054): n is a, c, g, or t
  misc_feature (1056)..(1056): n is a, c, g, or t
  misc_feature (1060)..(1060): n is a, c, g, or t
  misc_feature (1069)..(1069): n is a, c, g, or t
  misc_feature (1074)..(1075): n is a, c, g, or t
  misc_feature (1077)..(1077): n is a, c, g, or t
gggaccggcgcgcgctctcgtcgcccccgctgtcccggcggcgccaaccgaagcgccccgcctgctccgtgtccgacatgctgcgccgcgctctgctgtgcctggccgtggccgccctggtgcgcgccgacgcccccgaggaggaggaccacgtcctggtgctgaggaaaagcaacttcgcggaggcgctggcggcccacaagtacctgctggtggagttctatgccccttggtgtggccactgcaaggctctggcccctgagtatgccaaagccgctgggaagctgaaggcagaaggttccgagatcaggttggccaaggtggacgccacggaggagtctgacctggcccagcagtacggcgtgcgcggctatcccaccatcaagttcttcaggaatggagacacggcttcccccaaggaatatacagctggcagagaggctgatgacatcgtgaactggctgaagaagcgcacgggcccggctgccaccaccctgcctgacggcgcagctgcagagtccttggtggagtccagcgaggtggctgtcatcggcttcttcaaggacgtggagtcggactctgccaagcagtttttgcaggcagcagaggccatcgatgacataccatttgggatcacttccaacagtgacgtgttctccaaataccagctcgacaaagatggggttgtcctctttaanaagtttgatgaangccggaacaactttgaaggggaggtcaccaaggagaacctgctggactttatcaaacacaaccagctgccccttgtcattganttcaccgagcaaaacagccccgaaaattttttggaggtgaaatcaanactcacatcctgctgttcttgcccnaaaantgtgtctgantatgacggcaaactgaacaactttnaaaaaancaacccgaaaacttnaaagggcaaaattcttgtttnntnttnntcgaangngaancaaancgaaaaaccanngnaattctncaantttttttgnccttnaaaaaagaaaaaatgcccggccgtggcccctttatnnccttngnagangaaaaaaancaaannanaaac

SEQ ID NO: 167 - DNA, 1089 bp, Homo sapiens
  misc_feature (23)..(23): n is a, c, g, or t
  misc_feature (27)..(27): n is a, c, g, or t
  misc_feature (815)..(815): n is a, c, g, or t
  misc_feature (844)..(844): n is a, c, g, or t
  misc_feature (896)..(896): n is a, c, g, or t
  misc_feature (907)..(907): n is a, c, g, or t
  misc_feature (916)..(916): n is a, c, g, or t
  misc_feature (930)..(930): n is a, c, g, or t
  misc_feature (936)..(936): n is a, c, g, or t
  misc_feature (941)..(941): n is a, c, g, or t
  misc_feature (956)..(956): n is a, c, g, or t
  misc_feature (960)..(960): n is a, c, g, or t
  misc_feature (976)..(976): n is a, c, g, or t
  misc_feature (982)..(982): n is a, c, g, or t
  misc_feature (996)..(997): n is a, c, g, or t
  misc_feature (1006)..(1006): n is a, c, g, or t
  misc_feature (1009)..(1009): n is a, c, g, or t
  misc_feature (1020)..(1023): n is a, c, g, or t
  misc_feature (1027)..(1027): n is a, c, g, or t
  misc_feature (1033)..(1033): n is a, c, g, or t
  misc_feature (1037)..(1037): n is a, c, g, or t
  misc_feature (1050)..(1050): n is a, c, g, or t
  misc_feature (1072)..(1073): n is a, c, g, or t
  misc_feature (1080)..(1080): n is a, c, g, or t
  misc_feature (1086)..(1087): n is a, c, g, or t
ggctctctcctcgaggatcgagnggantctgaccacagcctgtggctgggaagggagacagaggcggcggcggctcaggggaaacgaggctgcagtggtggtagtaggaagatgtcgggcgaggacgagcaacaggagcaaactatcgctgaggacctggtcgtgaccaagtataagatggggggcgacatcgccaacagggtacttcggtccttggtggaagcatctagctcaggtgtgtcggtactgagcctgtgtgagaaaggtgatgccatgattatggaagaaacagggaaaatcttcaagaaagaaaaggaaatgaagaaaggtattgcttttcccaccagcatttcggtaaataactgtgtatgtcacttctcccctttgaagagcgaccaggattatattctcaaggaaggtgacttggtaaaaattgaccttggggtccatgtggatggcttcatcgctaatgtagctcacacttttgtggttgatgtagctcaggggacccaagtaacagggaggaaagcagatgttattaaggcagctcacctttgtgctgaagctgccctacgcctggtcaaacctggaaatcagaacacacaagtgacagaagcctggaacaaagttgcccactcatttaactgcacgccaatagaaggtatgctgtcacaccagttgaagcagcatgtcatcgatggagaaaaaaccattatccagaatcccacagaccagcagaagaaggaccatgaaaaagctgaatttgaggtacatgaagtatatgctgtggatgttctcgtcagctcaggagaggncaaggccaaggatgcaggacagagaaccnctatttacaaacgagaccctctaaacagtatggactgaaaatgaaaacttcncgtgccttctncatggaggnggaaaggcgttttnatgccntgccntttactttaaaaacntttnaaaaaaaaaaaaagcncccaangggggtgggggaanncccccaaanaanaactgccgccnnnntttnttgttncttnaaaaaaaaggggnaattttttccccccttaaattnnaaatttncccccnncc

SEQ ID NO: 168 - DNA, 1031 bp, Homo sapiens
  misc_feature (722)..(722): n is a, c, g, or t
  misc_feature (795)..(795): n is a, c, g, or t
  misc_feature (804)..(804): n is a, c, g, or t
  misc_feature (814)..(814): n is a, c, g, or t
  misc_feature (823)..(823): n is a, c, g, or t
  misc_feature (841)..(842): n is a, c, g, or t
  misc_feature (850)..(850): n is a, c, g, or t
  misc_feature (866)..(866): n is a, c, g, or t
  misc_feature (870)..(870): n is a, c, g, or t
  misc_feature (907)..(907): n is a, c, g, or t
  misc_feature (909)..(909): n is a, c, g, or t
  misc_feature (913)..(913): n is a, c, g, or t
  misc_feature (919)..(919): n is a, c, g, or t
  misc_feature (922)..(923): n is a, c, g, or t
  misc_feature (935)..(936): n is a, c, g, or t
  misc_feature (939)..(939): n is a, c, g, or t
  misc_feature (943)..(943): n is a, c, g, or t
  misc_feature (951)..(951): n is a, c, g, or t
  misc_feature (982)..(982): n is a, c, g, or t
  misc_feature (990)..(991): n is a, c, g, or t
  misc_feature (995)..(996): n is a, c, g, or t
  misc_feature (1008)..(1009): n is a, c, g, or t
  misc_feature (1016)..(1016): n is a, c, g, or t
gctgagctctccgcgtcgcctctgtcgcccgcgcctggcctaccgcggcactcccggctgcacgctctgcttggcctcgccatgccggtggacctcagcaagtggtccgggcccttgagcctgcaagaagtggacgagcagccgcagcacccgctgcatgtcacctacgccggggcggcggtggacgagctgggcaaagtgctgacgcccacccaggttaagaatagacccaccagcatttcgtgggatggtcttgattcagggaagctctacaccttggtcctgacagacccggatgctcccagcaggaaggatcccaaatacagagaatggcatcatttcctggtggtcaacatgaagggcaatgacatcagcagtggcacagtcctctccgattatgtgggctcggggcctcccaagggcacaggcctccaccgctatgtctggctggtttacgagcaggacaggccgctaaagtgtgacgagcccatcctcagcaaccgatctggagaccaccgtggcaaattcaaggtggcgtccttccgtaaaaagtatgagctcagggccccggtggctggcacgtgttaccaggccgagtgggatgactatgtgcccaaactgtacgagcagctgtctgggaagtagggggttagcttggggaactgaactgtcctggaggccccaagccatgttccccagttcagtgtttgcatgtataaaanatttctcctcttcctgccccccttggcatgggtgaaacctgaccaatcaaatggtaatttgagggtgactttncctgctgcntggcctttanaaattttantcacccccctctgaattnntgtttttnaatcaaattttaaacntcanttttgggggggtatttttggaactgggaaaggggggncntccnaatttnttnntctgaaaaatanncancccnaaaatgtnaaaaaaaaaaaaaactgggggaaaaaaaacnagttttcnntgtnnaagccaaacctnnaaaaatnttttagggaaggttt

SEQ ID NO: 169 - DNA, 870 bp, Homo sapiens
  misc_feature (574)..(574): n is a, c, g, or t
  misc_feature (606)..(606): n is a, c, g, or t
  misc_feature (623)..(623): n is a, c, g, or t
  misc_feature (643)..(643): n is a, c, g, or t
  misc_feature (646)..(646): n is a, c, g, or t
  misc_feature (658)..(658): n is a, c, g, or t
  misc_feature (673)..(673): n is a, c, g, or t
  misc_feature (680)..(680): n is a, c, g, or t
  misc_feature (688)..(688): n is a, c, g, or t
  misc_feature (718)..(718): n is a, c, g, or t
  misc_feature (721)..(721): n is a, c, g, or t
  misc_feature (749)..(750): n is a, c, g, or t
  misc_feature (755)..(755): n is a, c, g, or t
  misc_feature (759)..(759): n is a, c, g, or t
  misc_feature (786)..(787): n is a, c, g, or t
  misc_feature (796)..(796): n is a, c, g, or t
  misc_feature (799)..(801): n is a, c, g, or t
  misc_feature (805)..(805): n is a, c, g, or t
  misc_feature (809)..(809): n is a, c, g, or t
  misc_feature (812)..(812): n is a, c, g, or t
  misc_feature (814)..(814): n is a, c, g, or t
  misc_feature (824)..(824): n is a, c, g, or t
  misc_feature (832)..(833): n is a, c, g, or t
  misc_feature (841)..(841): n is a, c, g, or t
  misc_feature (860)..(860): n is a, c, g, or t
  misc_feature (864)..(864): n is a, c, g, or t
  misc_feature (867)..(867): n is a, c, g, or t
gggtgtcggtggttagtttctgcgacttgtgttgggactgctgataggaagatgtcttcaggaaatgctaaaattgggcaccctgcccccaacttcaaagccacagctgttatgccagatggtcagtttaaagatatcagcctgtctgactacaaaggaaaatatgttgtgttcttcttttaccctcttgacttcacctttgtgtgccccacggagatcattgctttcagtgatagggcagaagaatttaagaaactcaactgccaagtgattggtgcttctgtggattctcacttctgtcatctagcatgggtcaatacacctaagaaacaaggaggactgggacccatgaacattcctttggtatcagacccgaagcgcaccattgctcaggattatggggtcttaaaggctgatgaaggcatctcgttcaggggcctttttatcattgatgataagggtattcttcggcagatcactgtaaatgacctccctgttggccgctctgtggatgagactttgagactagttcaggccttccagttcactgacaaacatgggggaagtgtgcccnagctggctggaaacctggcagtgataccatcnagcctgatgtccaaaanaagcaaaaaatatttctccnaancaaaaatgaccnctgggcctgttttantggccangctgcggnggggcaaccctgaaaaaaaaaaaccccctnccngaaattttttttttccccttagaaaaanncccanaacnttcaaattccccccaaaattggggggnntctaaaaanggnnnggcntttnccnanaggggggggnaaaaaacnncccctttnttcccttggaaaaaaaggncccnaanttg

SEQ ID NO: 170 - DNA, 899 bp, Homo sapiens
gaggcactgcgggagcgctggctgctggaggggacgccgtcctcggcctcagagggggatgaggacctgaggaggcagatgcaggacgacgagcagaagacacggctgctggaggactcggtgtccaggttggagaaggaaattgaggtgctggagcgtggagactccgccccagccactgccaaggagaacgcggcggccccgagcccagtccgggccccagccccgagtccagccaaggaggagcgcaagacagaggtggtgatgaattcacagcagacgccggtgggcacgcccaaagacaagcgagtctccaacacgcccctgaggacggttgacggctcccccatgatgaaggcagtggtccatgctgtggacggcaccgccgagaacgggatccaccccctgagctcctccgaggtggacgaactcatccacaaagcggacgaggtcacgctgagcgaggcagggtccacggccggggcggcagagacccggggggctgtggagggggcagcccggaccacgccctcccggcgggagatcaccggtgtgcaggcacagccaggcgaggccacgtccggcccgccggggatccagcccggccaggagcccccggtcacaatgatcttcatgggttaccagaacgtggaggatgaggccgagaccaagaaggtgctgggccttcaagataccatcacggcggagctggtggtcatcgaagacgcggctgagcccaaggagcctgcaccacccaacggcagtgctgccgagcctcccacggaggccgcctccagggaagagaatcaggcggggcccgaggccaccaccagcgacccccaggacctcgacatgaagaagcaccgttgtaaatgctgctccatcatgtgagccggccc

SEQ ID NO: 171 - DNA, 833 bp, Homo sapiens
  misc_feature (725)..(725): n is a, c, g, or t
  misc_feature (737)..(737): n is a, c, g, or t
  misc_feature (739)..(739): n is a, c, g, or t
  misc_feature (766)..(766): n is a, c, g, or t
  misc_feature (799)..(799): n is a, c, g, or t
gccctggatagcctgaatactcacctcttcctgcagggacccaagatcgcagaggagtttgaggtggagctggagcggggcaagacgctgcacatcaaagccctggccgtgagcgacctgaaccgggccggccagaggcaggtcttctttgagctcaatgggcagctgcggtccatcttggtcaaggacacccaggccatgaaggagatgcacttccaccccaaggccctaaaggacgtgaagggccagatcggggcgcccatgcctgggaaggtgatagacatcaaagtggtggcaggggccaaggtggccaagggccagcccctgtgtgtgctcagtgccatgaagatggagactgtggtgacctcacccatggagggtactgtccgcaaggttcatgtgaccaaggacatgacactggaaggtgacgacctcatcctggagatcgagtgatcttgccccagaccggcagcctggccatccccaagccttcaacagaagctgtgctgccacggcaggcccaggccagccagtgcccgaggccaggaaggccgggccgtggaggtcctgtccacagctggacaggagagacaccgcctgcggtggttcattcctttcagccatcgtcctttcctccggcggacagctgcttacatgttcatctcttgccaaataagggtcccctcctcactggaaactacaagtggtgggtcaggtggtcctangacccaggggangnttaaggggtcctatctcctgggggaanggggaaatctaaaatgtcccaggtcctgggaantttactcaataaagctggctttcccctgccctcc

SEQ ID NO: 172 - DNA, 1034 bp, Homo sapiens
  misc_feature (789)..(789): n is a, c, g, or t
  misc_feature (791)..(791): n is a, c, g, or t
  misc_feature (832)..(832): n is a, c, g, or t
  misc_feature (841)..(841): n is a, c, g, or t
  misc_feature (850)..(850): n is a, c, g, or t
  misc_feature (860)..(860): n is a, c, g, or t
  misc_feature (876)..(876): n is a, c, g, or t
  misc_feature (882)..(882): n is a, c, g, or t
  misc_feature (886)..(886): n is a, c, g, or t
  misc_feature (892)..(892): n is a, c, g, or t
  misc_feature (925)..(926): n is a, c, g, or t
  misc_feature (949)..(949): n is a, c, g, or t
  misc_feature (963)..(963): n is a, c, g, or t
  misc_feature (968)..(968): n is a, c, g, or t
  misc_feature (970)..(971): n is a, c, g, or t
  misc_feature (973)..(973): n is a, c, g, or t
  misc_feature (982)..(982): n is a, c, g, or t
  misc_feature (984)..(984): n is a, c, g, or t
  misc_feature (992)..(992): n is a, c, g, or t
  misc_feature (995)..(995): n is a, c, g, or t
  misc_feature (1000)..(1000): n is a, c, g, or t
  misc_feature (1003)..(1003): n is a, c, g, or t
  misc_feature (1012)..(1012): n is a, c, g, or t
  misc_feature (1014)..(1015): n is a, c, g, or t
  misc_feature (1024)..(1025): n is a, c, g, or t
  misc_feature (1028)..(1028): n is a, c, g, or t
ggtcggttcgatcgccgccgggacctgacaccgcccggagttggcgtcccttctccctctccgagtgctgctcctgtcattgtggccatggacgataccctgttccagttgaagttcacggcgaagcagctggagaagctggccaagaaggcggagaaggactccaaggcggagcaggccaaagtgaagaaggcccttctgcagaaaaatgtagagtgtgcccgtgtgtatgccgagaacgccatccgcaagaagaacgaaggtgtgaactggcttcggatggcgtcccgcgtagacgcagtggcctccaaggtgcagacagctgtgactatgaagggggtgaccaagaatatggcccaggtgaccaaagccctggacaaggccctgagcaccatggacctgcagaaggtctcctcagtgatggacaggttcgagcagcaggtgcagaacctggacgtccatacatcggtgatggaggactccatgagctcggccaccaccctgaccacgccgcaggagcaggtggacagcctcatcatgcagatcgccgaggagaatggcctggaggtgctggaccagctcagccagctgcccgagggcgcctctgccgtgggcgagagctctgtgcgcagccaggaggaccagctgtcacggaggttggccgccttgaggaactagccgtgccccgccggtgtgcaccgcctctgccccgtgatgtgctggaaggctcctgtcctctccccaccgcgtcttgcctttgtgctgaccccgcggggctgcggccggcancnactctgcgtctctcacctgccaggcctgcgtggccttaggntgttcctgnttcttttangttgggcggngggtctgtgtcctggngttgantttntgcaantttctgggggtgatttttgtgactctgggcccnnaccggggaaggccaaaaaggggnccctggggactttnccccnannantgggggggncnttcaaaanttnggggnaanaaaaaatgntnnttcccattnnccnaaaggg

SEQ ID NO: 173 - DNA, 1077 bp, Homo sapiens
  misc_feature (753)..(753): n is a, c, g, or t
  misc_feature (786)..(786): n is a, c, g, or t
  misc_feature (790)..(790): n is a, c, g, or t
  misc_feature (801)..(801): n is a, c, g, or t
  misc_feature (858)..(858): n is a, c, g, or t
  misc_feature (874)..(874): n is a, c, g, or t
  misc_feature (880)..(880): n is a, c, g, or t
  misc_feature (887)..(887): n is a, c, g, or t
  misc_feature (924)..(924): n is a, c, g, or t
  misc_feature (933)..(933): n is a, c, g, or t
  misc_feature (941)..(941): n is a, c, g, or t
  misc_feature (957)..(957): n is a, c, g, or t
  misc_feature (961)..(961): n is a, c, g, or t
  misc_feature (988)..(988): n is a, c, g, or t
  misc_feature (994)..(995): n is a, c, g, or t
  misc_feature (997)..(997): n is a, c, g, or t
  misc_feature (1009)..(1009): n is a, c, g, or t
  misc_feature (1011)..(1011): n is a, c, g, or t
  misc_feature (1029)..(1029): n is a, c, g, or t
  misc_feature (1033)..(1033): n is a, c, g, or t
  misc_feature (1038)..(1038): n is a, c, g, or t
  misc_feature (1042)..(1042): n is a, c, g, or t
  misc_feature (1045)..(1045): n is a, c, g, or t
  misc_feature (1055)..(1055): n is a, c, g, or t
  misc_feature (1058)..(1059): n is a, c, g, or t
  misc_feature (1062)..(1062): n is a, c, g, or t
  misc_feature (1071)..(1074): n is a, c, g, or t
  misc_feature (1077)..(1077): n is a, c, g, or t
gggcacctgaaggagacttgggggcacccgcgtcgtgcctcctgggttgtgaggagtcgccgctgccgccactgcctgtgcttcatgaggaagatgctcgccgccgtctcccgcgtgctgtctggcgcttctcagaagccggcaagcagagtgctggtagcatcccgtaattttgcaaatgatgctacatttgaaattaagaaatgtgaccttcaccggctggaagaaggccctcctgtcacaacagtgctcaccagggaggatgggctcaaatactacaggatgatgcagactgtacgccgaatggagttgaaagcagatcagctgtataaacagaaaattattcgtggtttctgtcacttgtgtgatggtcaggaagcttgctgtgtgggcctggaggccggcatcaaccccacagaccatctcatcacagcctaccgggctcacggctttactttcacccggggcctttccgtccgagaaattctcgcagagcttacaggacgaaaaggaggttgtgctaaagggaaaggaggatcgatgcacatgtatgccaagaacttctacgggggcaatggcatcgtgggagcgcaggtgcccctgggcgctgggattgctctagcctgtaagtataatggaaaagatgaggtctgcctgactttatatggcgatggtgctgctaaccagggccagatattcgaagcttacaacatggcagctttgtggaaattaccttgtattttcatctgtganaaaaatcgctatggaatgggaacgtctgttganagancggcagcccancactgattactacaaaagaggcgatttcatttcttgggctgaaaatggatggaatgnatatcctgggcgtccnaaaggnaacaagnttgctgctgcccattgaaaatctgggaaggggccctnctgatgganctgcaaantttacgttaccccggnaccngtatgaatgaccctgggaattcctttnccgtanncnaaaaaaaatttncngaaattaaaaaataaaangggnccctntttntgnctttcccagnaannganaggggaaannnnatn

SEQ ID NO: 174 - DNA, 556 bp, Homo sapiens
ggccttcccaacatggcgcagtctattaacatcacggagctgaatctgccgcagctagaaatgctcaagaaccagctggaccaggaagtggagttcttgtccacgtccattgctcagctcaaagtggtacagaccaagtatgtggaagccaaggactgtctgaacgtgctgaacaagagcaacgaggggaaagaattactcgtcccactgacgagttctatgtatgtccctgggaagctgcatgatgtggaacacgtgctcatcgatgtgggaactgggtactatgtagagaagacagctgaggatgccaaggacttcttcaagaggaagatagattttctaaccaagcagatggagaaaatccaaccagctcttcaggagaagcacgccatgaaacaggccgtcatggaaatgatgagtcagaagattcagcagctcacagccctgggggcagctcaggctactgctaaggcctgagagtttttgcagaaatggggcagagggacaccctttgggcgtggcttcctggtgatgggaagggtcttgtgttttaatg

SEQ ID NO: 175 - DNA, 1071 bp, Homo sapiens
  misc_feature (797)..(797): n is a, c, g, or t
  misc_feature (851)..(851): n is a, c, g, or t
  misc_feature (875)..(875): n is a, c, g, or t
  misc_feature (898)..(898): n is a, c, g, or t
  misc_feature (953)..(953): n is a, c, g, or t
  misc_feature (960)..(961): n is a, c, g, or t
  misc_feature (966)..(967): n is a, c, g, or t
  misc_feature (971)..(971): n is a, c, g, or t
  misc_feature (976)..(976): n is a, c, g, or t
  misc_feature (985)..(985): n is a, c, g, or t
  misc_feature (995)..(995): n is a, c, g, or t
  misc_feature (1011)..(1011): n is a, c, g, or t
  misc_feature (1017)..(1017): n is a, c, g, or t
  misc_feature (1027)..(1027): n is a, c, g, or t
  misc_feature (1037)..(1037): n is a, c, g, or t
  misc_feature (1045)..(1046): n is a, c, g, or t
  misc_feature (1054)..(1055): n is a, c, g, or t
  misc_feature (1060)..(1060): n is a, c, g, or t
  misc_feature (1066)..(1066): n is a, c, g, or t
gggagatttcaagatgcggttcgactccgagggaggagctttgcgggcaacctgaacacctacaagcgacttgccatcaagctgccggatgatcagatcccaaagaccaattgcaacgtagctgtcatcaacgtgggggcacccgcggctgggatgaacgcagccgtacgctcagctgtgcgcgtgggcattgccgacggccacaggatgctcgccatctatgatggctttgacggcttcgccaagggccagatcaaagaaatcggctggacagatgtcgggggctggaccggccaaggaggctccattcttgggacaaaacgcgttctcccggggaagtacttggaagagatcgccacacagatgcgcacgcacagcatcaacgcgctgctgatcatcggtggattcgaggcctacctgggactcctggagctgtcagccgcccgggagaagcacgaggagttctgtgtccccatggtcatggttcccgctactgtgtccaacaatgtgccgggttccgatttcagcatcggggcagacaccgccctgaacactatcaccgacacctgcgaccgcatcaagcagtccgccagcggaaccaagcggcgcgtgttcatcatcgagaccatgggcggctactgtggctacctggccaacatgggggggctcgcggctggagctgatgccgcatacattttcgaagagcccttcgacatcagggatctgcagtccaacgtggagcacctgacggagaaaatgaagaccaccatccagagaggccttgtgctcaaaatganagctgcagtgaaaactacaccaccgacttcatttaccagctgtattcaaaaaanggcaaaggcgtgtttgactgcagnaaaaacgtgctgggtcaatgcancagggggggcaccctctcctttgaaaaaactttggaaccaaaatctctgccaaantttggannggatnnctgnaaaantcaaggagnccggggcaangaaaaaaatttccccnatgatnccttttgggntgggaaaaanaaaaaaanntttttttnncctgngcaaantaaaa

SEQ ID NO: 176 - DNA, 1143 bp, Homo sapiens
  misc_feature (784)..(784): n is a, c, g, or t
  misc_feature (800)..(800): n is a, c, g, or t
  misc_feature (867)..(867): n is a, c, g, or t
  misc_feature (870)..(870): n is a, c, g, or t
  misc_feature (876)..(876): n is a, c, g, or t
  misc_feature (881)..(881): n is a, c, g, or t
  misc_feature (883)..(883): n is a, c, g, or t
  misc_feature (907)..(907): n is a, c, g, or t
  misc_feature (912)..(912): n is a, c, g, or t
  misc_feature (922)..(922): n is a, c, g, or t
  misc_feature (931)..(931): n is a, c, g, or t
  misc_feature (954)..(954): n is a, c, g, or t
  misc_feature (968)..(968): n is a, c, g, or t
  misc_feature (984)..(984): n is a, c, g, or t
  misc_feature (989)..(989): n is a, c, g, or t
  misc_feature (993)..(993): n is a, c, g, or t
  misc_feature (995)..(995): n is a, c, g, or t
  misc_feature (1002)..(1002): n is a, c, g, or t
  misc_feature (1009)..(1009): n is a, c, g, or t
  misc_feature (1017)..(1017): n is a, c, g, or t
  misc_feature (1021)..(1022): n is a, c, g, or t
  misc_feature (1025)..(1025): n is a, c, g, or t
  misc_feature (1027)..(1027): n is a, c, g, or t
  misc_feature (1035)..(1035): n is a, c, g, or t
  misc_feature (1077)..(1077): n is a, c, g, or t
  misc_feature (1079)..(1079): n is a, c, g, or t
  misc_feature (1093)..(1093): n is a, c, g, or t
  misc_feature (1113)..(1113): n is a, c, g, or t
  misc_feature (1118)..(1119): n is a, c, g, or t
  misc_feature (1131)..(1132): n is a, c, g, or t
  misc_feature (1141)..(1141): n is a, c, g, or t
gccgctgcgcctgctgctcctcgccgtccgcgctgcagtgcgaagggctcgaagatggccggttggcagagctacgtggataacctgatgtgcgatggctgctgccaggaggccgccattgtcggctactgcgacgccaaatacgtctgggcagccacggccgggggcgtctttcagagcattacgccaatagaaatagatatgattgtaggaaaagaccgggaaggtttctttaccaacggtttgactcttggcgcgaagaaatgctcagtgatcagagatagtctatacgtcgatggtgactgcacaatggacatccggacaaagagtcaaggtggggagccaacatacaatgtggctgtcggcagagctggtagagtcttggtctttgtaatgggaaaagaaggggtccatggaggcggattgaataagaaggcatactcaatggcaaaatacttgagagactctgggttctagctgctaggcagactgttaagtattaggggaaaattgctcttaaactttcctagctataagcttaagtcttaattctggaaattttattagcaatgcagggtgatggggtatgaacctgtgtctcctttgtatccctctgttggtggggaaaggtgtctttctttctgccctccccccccaaaataattctgttcacttttgttttgtttccttgtgtactccagcattggttatagtcatgggaaaggaaggtgtccacggaggcacacttaacaagaaagcatatgaactccctttatacctgagnaggtctgatgtgtaancagcctctccccatctacctagcaactgtcttcatcaacaaccctaattatggtcacaatgctaccnaanctgtanatggnanctaatttttctttacctattttcnaatgncatgattccnggtttgccnatggatcatttgtatgttaaccnctgtatgtaaccancccttatctggcaacntaatngcancncaaaaanggatttncatgaaancctnnaantngggggganggggcatgcccaatttgggcctccctttttttttaacaattnanggggaatttgtttnccaaaaaaaatttaaatttnaaccnnggggccgggttnnaaaaccccnga

SEQ ID NO: 177 - DNA, 942 bp, Homo sapiens
  misc_feature (628)..(628): n is a, c, g, or t
  misc_feature (642)..(642): n is a, c, g, or t
  misc_feature (684)..(684): n is a, c, g, or t
  misc_feature (687)..(687): n is a, c, g, or t
  misc_feature (714)..(714): n is a, c, g, or t
  misc_feature (735)..(735): n is a, c, g, or t
  misc_feature (767)..(768): n is a, c, g, or t
  misc_feature (776)..(776): n is a, c, g, or t
  misc_feature (803)..(803): n is a, c, g, or t
  misc_feature (814)..(814): n is a, c, g, or t
  misc_feature (817)..(817): n is a, c, g, or t
  misc_feature (830)..(830): n is a, c, g, or t
  misc_feature (847)..(847): n is a, c, g, or t
  misc_feature (853)..(853): n is a, c, g, or t
  misc_feature (856)..(856): n is a, c, g, or t
  misc_feature (870)..(873): n is a, c, g, or t
  misc_feature (878)..(878): n is a, c, g, or t
  misc_feature (896)..(896): n is a, c, g, or t
  misc_feature (900)..(901): n is a, c, g, or t
  misc_feature (910)..(910): n is a, c, g, or t
  misc_feature (912)..(912): n is a, c, g, or t
  misc_feature (924)..(924): n is a, c, g, or t
  misc_feature (926)..(927): n is a, c, g, or t
  misc_feature (932)..(932): n is a, c, g, or t
  misc_feature (935)..(936): n is a, c, g, or t
  misc_feature (941)..(941): n is a, c, g, or t
gcgcatccccagcccgccgccatggccgcctacaaactggtgctgatccggcacggcgagagcgcatggaacctggagaaccgcttcagcggctggtacgacgccgacctgagcccggcgggccacgaggaggcgaagcgcggcgggcaggcgctacgagatgctggctatgagtttgacatctgcttcacctcagtgcagaagagagcgatccggaccctctggacagtgctagatgccattgatcagatgtggctgccagtggtgaggacttggcgcctcaatgagcggcactatgggggtctaaccggtctcaataaagcagaaactgctgcaaagcatggtgaggcccaggtgaagatctggaggcgctcctatgatgtcccaccacctccgatggagcccgaccatcctttctacagcaacatcagtaaggatcgcaggtatgcagacctcacagaagatcagctaccctcctgtgagagtctgaaggatactattgccagagctctgcccttctggaatgaagaaatagttccccagatcaaggaggggaaacgtgtactgattgcagcccatggcaacagcctccggggcattgtcaagcatctggagggtctctctgaanaagctatcatgganctgaacctgccgactggtattcccattgtctatgaattgganaanaacttgaagcctatcaagcccatgcantttctgggggatgaaaaaacngtgcgcaaaaccatggaaactgtggctgcccnnggcaaggncaaaaaatgaaggccggcggggaaaanactgtccccanganaacccttccctgnccgttttgtccctttgncccctnccnccttggaaatgttnnnnatganccaattttttaaaaattnttgnnttttaactncnaaaaggggaacnannggctnccnnttttnt

SEQ ID NO: 178 - DNA, 970 bp, Homo sapiens
  misc_feature (714)..(714): n is a, c, g, or t
  misc_feature (750)..(750): n is a, c, g, or t
  misc_feature (794)..(794): n is a, c, g, or t
  misc_feature (807)..(807): n is a, c, g, or t
  misc_feature (823)..(823): n is a, c, g, or t
  misc_feature (859)..(859): n is a, c, g, or t
  misc_feature (873)..(873): n is a, c, g, or t
  misc_feature (875)..(875): n is a, c, g, or t
  misc_feature (892)..(892): n is a, c, g, or t
  misc_feature (899)..(899): n is a, c, g, or t
  misc_feature (912)..(912): n is a, c, g, or t
  misc_feature (914)..(914): n is a, c, g, or t
  misc_feature (921)..(921): n is a, c, g, or t
  misc_feature (924)..(924): n is a, c, g, or t
  misc_feature (934)..(934): n is a, c, g, or t
  misc_feature (941)..(941): n is a, c, g, or t
  misc_feature (943)..(943): n is a, c, g, or t
  misc_feature (948)..(948): n is a, c, g, or t
  misc_feature (951)..(951): n is a, c, g, or t
  misc_feature (953)..(954): n is a, c, g, or t
  misc_feature (960)..(960): n is a, c, g, or t
  misc_feature (963)..(963): n is a, c, g, or t
  misc_feature (965)..(965): n is a, c, g, or t
  misc_feature (968)..(969): n is a, c, g, or t
ggctgtctgcggaggaaactgcatcgacggacggccgcccagctacgggaggacctggagtggcactgggcgcccgacggaccatccccgggacccgcctgcccctcggcgccccgccccgccgggccgctccccgtcgggttccccagccacagccttacctacgggctcctgactccgcaaggcttccagaagatgctcgaaccaccggccggggcctcggggcagcagtgagggaggcgtccagccccccactcagctcttctcctcctgtgccaggggctccccgggggatgagcatggtggttttccctcggagccccctggctcgggacgtctgagaagatgccggtcatgaggctgttcccttgcttcctgcagctcctggccgggctggcgctgcctgctgtgcccccccagtgggccttgtctgctgggaacggctcgtcagaggtggaagtggtacccttccaggaagtgtggggccgcagctactgccgggcgctggagaggctggtggacgtcgtgtccgagtaccccagcgaggtggagcacatgttcagcccatcctgtgtctccctgctgcgctgcaccggctgctgcggcgatgagaatctgcactgtgtgccggtggagacggccaatgtcaccatgcagctcctaaagatccgttctggggaccggccctcctacgtggagctgacgttctctcancacgttcgctgcgaatgccggcctctgcgggaaaanatgaagccggaaaggtgcggcgatgctgttcccccggaggtaanccaccccttggangaaaaaaaacccgcancccggctcgtgtatttattaccgtcacactcttcantgactcctgctggnancttgccctctatttatnaaccaantgttttcctgctnantgcctcnctnccttcaaaanaaggggnanggaanganannaccctnagnanttnnt

SEQ ID NO: 179 - DNA, 1072 bp, Homo sapiens
  misc_feature (796)..(796): n is a, c, g, or t
  misc_feature (798)..(798): n is a, c, g, or t
  misc_feature (836)..(836): n is a, c, g, or t
  misc_feature (839)..(839): n is a, c, g, or t
  misc_feature (857)..(857): n is a, c, g, or t
  misc_feature (862)..(862): n is a, c, g, or t
  misc_feature (873)..(873): n is a, c, g, or t
  misc_feature (891)..(891): n is a, c, g, or t
  misc_feature (907)..(907): n is a, c, g, or t
  misc_feature (920)..(920): n is a, c, g, or t
  misc_feature (931)..(931): n is a, c, g, or t
  misc_feature (953)..(953): n is a, c, g, or t
  misc_feature (957)..(957): n is a, c, g, or t
  misc_feature (963)..(963): n is a, c, g, or t
  misc_feature (978)..(978): n is a, c, g, or t
  misc_feature (991)..(991): n is a, c, g, or t
  misc_feature (997)..(997): n is a, c, g, or t
  misc_feature (1010)..(1010): n is a, c, g, or t
  misc_feature (1035)..(1049): n is a, c, g, or t
  misc_feature (1058)..(1058): n is a, c, g, or t
  misc_feature (1060)..(1060): n is a, c, g, or t
  misc_feature (1069)..(1069): n is a, c, g, or t
gcggacgcgtggggaggcggagcaggcgctgcggcaggagggaagatggcggacgaggagaagctgccgcccggctgggagaagcgcatgagccgcagctcaggccgagtgtactacttcaaccacatcactaacgccagccagtgggagcggcccagcggcaacagcagcagtggtggcaaaaacgggcagggggagcctgccagggtccgctgctcgcacctgctggtgaagcacagccagtcacggcggccctcgtcctggcggcaggagaagatcacccggaccaaggaggaggccctggagctgatcaacggctacatccagaagatcaagtcgggagaggaggactttgagtctctggcctcacagttcagcgactgcagctcagccaaggccaggggagacctgggtgccttcagcagaggtcagatgcagaagccatttgaagacgcctcgtttgcgctgcggacgggggagatgagcgggcccgtgttcacggattccggcatccacatcatcctccgcactgagtgagggtggggagcccaggcctggcctcggggcagggcagggcggctaggccggccagctcccccttgcccgccagccagtggccgaaccccccactccctgccaccgtcacacagtatttattgttcccacaatggctgggagggggcccttccagattgggggccctggggtccccactccctgtccatccccagttggggctgcgaccgccagattctcccttaaggaattgacttcagcaggggtgggaagctcccanancccaggggcagtgtggtgggaagggtgttccaaaaganaangcctggtcagcaaaaccnccccntgtccccccangtgctggaagcaaactcnaagggccgaattgttnctagttagccacnctcctttgttncattcccaaaggtgaaccctcntgcngcccancccttggcccttttnaacaacttttcancacccntttccccccaatnaaacccaaacccctggcaaaaaaannnnnnnnnnnnnnnaaaaaaggncnccccccccntaa

SEQ ID NO: 180 - DNA, 1092 bp, Homo sapiens
  misc_feature (770)..(770): n is a, c, g, or t
  misc_feature (878)..(878): n is a, c, g, or t
  misc_feature (880)..(880): n is a, c, g, or t
  misc_feature (911)..(912): n is a, c, g, or t
  misc_feature (927)..(927): n is a, c, g, or t
  misc_feature (946)..(946): n is a, c, g, or t
  misc_feature (949)..(949): n is a, c, g, or t
  misc_feature (971)..(972): n is a, c, g, or t
  misc_feature (975)..(975): n is a, c, g, or t
  misc_feature (1006)..(1006): n is a, c, g, or t
  misc_feature (1009)..(1009): n is a, c, g, or t
  misc_feature (1013)..(1013): n is a, c, g, or t
  misc_feature (1015)..(1015): n is a, c, g, or t
  misc_feature (1017)..(1017): n is a, c, g, or t
  misc_feature (1020)..(1021): n is a, c, g, or t
  misc_feature (1034)..(1034): n is a, c, g, or t
  misc_feature (1038)..(1038): n is a, c, g, or t
  misc_feature (1077)..(1078): n is a, c, g, or t
ggctttgtgtttcctgagccaacagcggatgtaaactacatcgtcatgctgacatgtgctgtgtgcctggtgacctacatggtcatggccgccatcctgcacaagctggaccagttggatgccagccggggctgcgccatccccttctgtgggcagcggggccgcttcaagtacgagatcctcgtcaagacaggctggggccggggctcaggtaccacggcccacgtgggcatcatgctgtatggggtggacagccggagcggccaccggcacctggacggcgacagagccttccaccgcaacagtctggacatcttccagatcgccaccccgcacagcctgggtagcgtgtggaagatccgagtgtggcacgacaacaaagggctcagccctgcctggttcctgcagcacatcatcgtcagggacctgcagacggcacgcagcaccttcttcctggtcaatgactggctttcggtggagacggaggccaacgggggcctggtggagaaggaggtgctggccgcgagtcacgcagccctgttgcgcttccggcgcctgctggtggctgagctgcagcgtggcttctttgacaagcacatctggctctccatatgggaccggccgcctcgtagctgtttcactcgcatccagagggccacctgctgcgatctcctcatctgtctcttcctgggcgccaacgccgtgtggtacggggctgttggagactctgcctacagcacggggcgtgtgtccaggctgaacccgctgancgtcgacacagtcgctgttggcctggtgtccagcgtggttgtctatcccgtctacctggccatcctctttctcttccggatgtcccgaacaaggtggctggaaacccnanccccacacctgccgggcaacaggtgctgaanntcaaaagctgcctgnaatcatccgtgctgaaaantcnttctcagttttcaggcctccannctnaagtgaggctctactgggggtctgccccctnggncaantngnaannaaacctggccctntaanaggctttttggaaaaaaaaaaagaattttttggaaaatnnaaagttaaaaaaac

SEQ ID NO: 181 - DNA, 1107 bp, Homo sapiens
  misc_feature (836)..(836): n is a, c, g, or t
  misc_feature (888)..(888): n is a, c, g, or t
  misc_feature (902)..(902): n is a, c, g, or t
  misc_feature (904)..(904): n is a, c, g, or t
  misc_feature (907)..(907): n is a, c, g, or t
  misc_feature (922)..(922): n is a, c, g, or t
  misc_feature (939)..(939): n is a, c, g, or t
  misc_feature (947)..(947): n is a, c, g, or t
  misc_feature (954)..(954): n is a, c, g, or t
  misc_feature (969)..(969): n is a, c, g, or t
  misc_feature (989)..(989): n is a, c, g, or t
  misc_feature (993)..(993): n is a, c, g, or t
  misc_feature (995)..(996): n is a, c, g, or t
  misc_feature (998)..(998): n is a, c, g, or t
  misc_feature (1016)..(1016): n is a, c, g, or t
  misc_feature (1025)..(1025): n is a, c, g, or t
  misc_feature (1032)..(1032): n is a, c, g, or t
  misc_feature (1037)..(1037): n is a, c, g, or t
  misc_feature (1042)..(1043): n is a, c, g, or t
  misc_feature (1067)..(1067): n is a, c, g, or t
  misc_feature (1069)..(1069): n is a, c, g, or t
  misc_feature (1071)..(1072): n is a, c, g, or t
  misc_feature (1074)..(1074): n is a, c, g, or t
  misc_feature (1079)..(1079): n is a, c, g, or t
  misc_feature (1089)..(1089): n is a, c, g, or t
  misc_feature (1091)..(1091): n is a, c, g, or t
  misc_feature (1104)..(1104): n is a, c, g, or t
  misc_feature (1106)..(1106): n is a, c, g, or t
ggccgtggctccggatctcttcgtctttgcagcgtagcccgagtcggtcagcgccggaggacctcagcagccatgtcgaagccccatagtgaagccgggactgccttcattcagacccagcagctgcacgcagccatggctgacacattcctggagcacatgtgccgcctggacattgattcaccacccatcacagcccggaacactggcatcatctgtaccattggcccagcttcccgatcagtggagacgttgaaggagatgattaagtctggaatgaatgtggctcgtctgaacttctctcatggaactcatgagtaccatgcggagaccatcaagaatgtgcgcacagccacggaaagctttgcttctgaccccatcctctaccggcccgttgctgtggctctagacactaaaggacctgagatccgaactgggctcatcaagggcagcggcactgcagaggtggagctgaagaagggagccactctcaaaatcacgctggataacgcctacatggaaaagtgtgacgagaacatcctgtggctggactacaagaacatctgcaaggtggtggaagtgggcagcaagatctacgtggatgatgggcttatttctctccaggtgaagcagaaaggtgccgacttcctggtgacggaggtggaaaatggtggctccttgggcagcaagaagggtgtgaaccttcctggggctgctgtggacttgcctgctgtgtcggagaaggacatccaggatctgaagtttggggtcgagcaggatgttgatatggtgtttgcgtcattcatccgcaaggcatctgatgtccatgaagttangaaggtcctgggagagaagggaaagaacatcaagattatcagcaaaatcganaatcatgagggggntncgnagtttgatgaaatcntggaggccagtgatggnatcatggnggctcgnggggatctaggcatngaaattctggcaaaaaggtnttcntnncncaaaaaataaaattgganggggcaccnaactggnaaacntttcnntgtgctacccaaatgctgggaaancntnntnaaaancccccccccncnccgggctgaaagnang

SEQ ID NO: 182 - DNA, 1214 bp, Homo sapiens
  misc_feature (757)..(757): n is a, c, g, or t
  misc_feature (889)..(889): n is a, c, g, or t
  misc_feature (923)..(923): n is a, c, g, or t
  misc_feature (941)..(941): n is a, c, g, or t
  misc_feature (947)..(947): n is a, c, g, or t
  misc_feature (953)..(953): n is a, c, g, or t
  misc_feature (957)..(957): n is a, c, g, or t
  misc_feature (961)..(961): n is a, c, g, or t
  misc_feature (969)..(969): n is a, c, g, or t
  misc_feature (989)..(990): n is a, c, g, or t
  misc_feature (992)..(993): n is a, c, g, or t
  misc_feature (1003)..(1003): n is a, c, g, or t
  misc_feature (1005)..(1005): n is a, c, g, or t
  misc_feature (1014)..(1014): n is a, c, g, or t
  misc_feature (1023)..(1023): n is a, c, g, or t
  misc_feature (1049)..(1049): n is a, c, g, or t
  misc_feature (1062)..(1062): n is a, c, g, or t
  misc_feature (1064)..(1064): n is a, c, g, or t
  misc_feature (1069)..(1069): n is a, c, g, or t
  misc_feature (1072)..(1072): n is a, c, g, or t
  misc_feature (1078)..(1078): n is a, c, g, or t
  misc_feature (1093)..(1093): n is a, c, g, or t
  misc_feature (1097)..(1098): n is a, c, g, or t
  misc_feature (1104)..(1104): n is a, c, g, or t
  misc_feature (1118)..(1118): n is a, c, g, or t
  misc_feature (1135)..(1135): n is a, c, g, or t
  misc_feature (1153)..(1153): n is a, c, g, or t
  misc_feature (1164)..(1164): n is a, c, g, or t
  misc_feature (1179)..(1179): n is a, c, g, or t
  misc_feature (1182)..(1182): n is a, c, g, or t
  misc_feature (1185)..(1185): n is a, c, g, or t
  misc_feature (1196)..(1196): n is a, c, g, or t
gcctgtttccaggagcctgactacggggccctgtatgagggacgcaaccctggcttctatgtagaggcaaaccctatgccaactttcaagtgtgcagtcaaagccctctttgactacaaggcccagagggaggacgagctgaccttcatcaagagcgccatcatccagaatgtggagaagcaagagggaggctggtggcgaggggactacggagggaagaagcagctgtggttcccatcaaactacgtggaagagatggtcaaccccgtggccctggagccggagagggagcacttggacgagaacagccccctaggggacttgctgcggggggtcttggatgtgccggcttgtcagattgccatccgtcctgagggcaagaacaaccggctcttcgtcttctccatcagcatggcgtcggtggcccactggtccctggatgttgctgccgactcacaggaggagctgcaggactgggtgaaaaagatccgtgaagtggcccagacagcagacgccaggctcactgaagggaagataatggaacggaggaagaagattgccctggagctctctgaacttgtcgtctactgccggcctgttccctttgatgaagagaagattggcacagaacgtgcttgctaccgggacatgtcatccttcccggaaaccaaggctgagaaatacgtgaacaaggccaaaggcaagaagttccttcagtacaatcgactgcagctctcccgcatctaccccaagggcnagcgactggattcctccaactacgatccttttgcccatgtggatctgtgggcaagtcagcttgtggccctcaactttccaaaacccctgaacaagccctatgcaaaatgaaccagggcccttcttcatgaangggcaggcactggtggctacttgctgcagccaanccaccatgcgggaaagangccttncaaccntttngaanaaaaacancctccccggggctggaaccnngnngccctctttntngaggggctngggggcccnaaattcttccaaaaaaaaggcccaangcattttgtggtncnttttnggnaaaatnaaggggggctggganactnnaatttnaacccccccaaccnaaaaaaaaaaattttgngggggaaaaaggaacccnccctgtttggncaaccaaaacccttnccnttncaaaaaaaaanccccgaaattttcctttt

SEQ ID NO: 183 - DNA, 1087 bp, Homo sapiens
  misc_feature (777)..(777): n is a, c, g, or t
  misc_feature (780)..(780): n is a, c, g, or t
  misc_feature (853)..(853): n is a, c, g, or t
  misc_feature (862)..(862): n is a, c, g, or t
  misc_feature (886)..(886): n is a, c, g, or t
  misc_feature (909)..(909): n is a, c, g, or t
  misc_feature (920)..(920): n is a, c, g, or t
  misc_feature (925)..(925): n is a, c, g, or t
  misc_feature (947)..(947): n is a, c, g, or t
  misc_feature (952)..(952): n is a, c, g, or t
  misc_feature (957)..(957): n is a, c, g, or t
  misc_feature (974)..(974): n is a, c, g, or t
  misc_feature (985)..(985): n is a, c, g, or t
  misc_feature (1001)..(1001): n is a, c, g, or t
  misc_feature (1009)..(1009): n is a, c, g, or t
  misc_feature (1033)..(1033): n is a, c, g, or t
  misc_feature (1036)..(1037): n is a, c, g, or t
  misc_feature (1051)..(1051): n is a, c, g, or t
  misc_feature (1055)..(1055): n is a, c, g, or t
  misc_feature (1060)..(1060): n is a, c, g, or t
  misc_feature (1070)..(1070): n is a, c, g, or t
  misc_feature (1075)..(1075): n is a, c, g, or t
  misc_feature (1078)..(1078): n is a, c, g, or t
  misc_feature (1083)..(1084): n is a, c, g, or t
gccatcgtggacacgccgggattcggggacgctgtcaacaacaccgagtgctggaagcccatcaccgactatgtggaccagcagtttgagcagtacttccgtgatgagagcggcctcaaccgaaagaacatccaagacaaccgagtgcactgctgcctatacttcatctcccccttcgggcatgggctgcggccagtggatgtgggtttcatgaaggcattgcatgagaaggtcaacatcgtgcctctcatcgccaaagctgactgtcttgtccccagtgagatccggaagctgaaggagcggatccgggaggagattgacaagtttgggatccatgtataccagttccctgagtgtgactcggacgaggatgaggacttcaagcagcaggaccgggaactgaaggagagcgcgcccttcgccgttataggcagcaacacggtggtggaggccaaggggcagcgggtccggggccgactgtacccctgggggatcgtggaggtggagaaccaggcgcattgcgacttcgtgaagctgcgcaacatgctcatccgcacgcatatgcacgacctcaaggacgtgacgtgcgacgtgcactacgagaactaccgcgcgcactgcatccagcagatgaccagcaaactgacccaggacagccgcatggagagccccatcccgatcctgccgctgcccaccccggacgccgagactgagaagcttatcaggatgaaggatgaggaactgaggcgcatgcaggagatgctgcaaaggatgaancancaaatgcaggaccagtgacgctcgccgcggacacaccgtccgtctccgggacgccctcgcacccctggacacnaaaccggantgttcccgacccggaaacgcgggncccagcccccagctgaccctaantttattctcanccccncccccctcccaggtcattgtgntctgnttccnaggggcctggaccgaancccccccccanctggccctttctgacnttgggggnatcaggaaccaaattgggcggganttnnaaaatccccctccnttgnccttncccccccccnggaanggncaaannccc

SEQ ID NO: 184 - DNA, 653 bp, Homo sapiens
  misc_feature (624)..(624): n is a, c, g, or t
  misc_feature (627)..(628): n is a, c, g, or t
  misc_feature (633)..(652): n is a, c, g, or t
ggtgccgccaagggtgtggccgcctacatgaagtcggaggacccgctgttcgtgctggagcacagcctgcccattgacacgcagtactacctggagcagcagctggccaagcccctcctgcgcatcttcgagcccatcctgggcgagggccgtgccgaggctgtgctactgcggggggaccacacgcgctgcaagacggtgctcacgggcaaggtgggcggcctcctggccttcgccaaacgccgcaactgctgcattggctgccgcacagtgctcagccaccagggagccgtgtgtgagttctgccagccccgggagtctgagctgtatcagaaggaggtatcccatctgaatgccctggaggagcgcttctcgcgcctctggacgcagtgccagcgctgccagggcagcctgcacgaggacgtcatctgcaccagccgggactgccccatcttctacatgcgcaagaaggtgcggaaggacctggaagaccaggagcagctcctgcggcgcttcggaccccctggacctgaggcctggtgaccttgcaagcatcccatggggcgggggcgggaccagggagaattaataaagttctggacttttgctaaaaaaaaaaaaaanaannaaaannnnnnnnnnnnnnnnnnnna

SEQ ID NO: 185 - DNA, 1010 bp, Homo sapiens
  misc_feature (743)..(743): n is a, c, g, or t
  misc_feature (779)..(779): n is a, c, g, or t
  misc_feature (786)..(786): n is a, c, g, or t
  misc_feature (788)..(788): n is a, c, g, or t
  misc_feature (793)..(793): n is a, c, g, or t
  misc_feature (817)..(817): n is a, c, g, or t
  misc_feature (826)..(826): n is a, c, g, or t
  misc_feature (843)..(843): n is a, c, g, or t
  misc_feature (855)..(855): n is a, c, g, or t
  misc_feature (858)..(858): n is a, c, g, or t
  misc_feature (867)..(867): n is a, c, g, or t
  misc_feature (883)..(883): n is a, c, g, or t
  misc_feature (891)..(891): n is a, c, g, or t
  misc_feature (898)..(898): n is a, c, g, or t
  misc_feature (901)..(902): n is a, c, g, or t
  misc_feature (904)..(904): n is a, c, g, or t
  misc_feature (907)..(907): n is a, c, g, or t
  misc_feature (909)..(909): n is a, c, g, or t
  misc_feature (914)..(914): n is a, c, g, or t
  misc_feature (917)..(917): n is a, c, g, or t
  misc_feature (923)..(923): n is a, c, g, or t
  misc_feature (928)..(928): n is a, c, g, or t
  misc_feature (937)..(937): n is a, c, g, or t
  misc_feature (946)..(946): n is a, c, g, or t
  misc_feature (956)..(956): n is a, c, g, or t
  misc_feature (962)..(962): n is a, c, g, or t
  misc_feature (972)..(972): n is a, c, g, or t
  misc_feature (978)..(978): n is a, c, g, or t
  misc_feature (980)..(980): n is a, c, g, or t
  misc_feature (996)..(996): n is a, c, g, or t
  misc_feature (1008)..(1009): n is a, c, g, or t
gctccaagctgctcagggacgtgtatgccaaggatgggcgtgtgtcctacccgaagctgcacctgcccttgaagaccctgcagtgcctctttgagaagcagctccacatggagctggccagcagggtgtgcgtggtgtccgtggagaagcccacgttgccaagcaaggaggtcaagcacgcgcggaagaccctgaagaccctgcgggaccaatgggagaaagcactgtgccgggcgctgcgggagaccaagaaccgcctagagcgcgaggtgtacgagggccggttctcactttaccccttcctgtgcctgctggacgagcgcgaggtggtgcggatgctcctgcaggtcctgcaggcgctgcccgcccaaggtgagtccttcaccaccctggcccgggagctgagtgcgcgcactttcagccggcacgtggtgcagaggcagcgggtcagtggccaggtgcaggcgctgcagaaccactacaggaagtacctctgcttgctggcctccgacgccgaggtgcccgagccctgcctgccgcggcagtactgggaggcgctgggggcgcccgaggccctgcgggagcagccctggcccctgccagtgcagatggagctgggcaagctgctggcggagatgctggtgcaggctacgcagatgccatgcagcctggacaagccgcatcgttcctctcggcttgtccccgtgctctaccacgtgtattccttccgcaacgtccagcanatcggcatcctgaagccgcacccggcctacgtgcanctgctgnanaaagnccgcggaacccacgctgaccttcnaggcggtgnatgtacccatgctttgncccccgctgccntgnaaatcgccncactctgggtgccttnctgctcanccccacnaanntnaancncacgnggnaaggcnccacncaacaccanaactgctgnaaactgcccnccaccncgcttatggncattgnancccttccccaattggnaaatgccctggnng

SEQ ID NO: 186 - DNA, 1003 bp, Homo sapiens
  misc_feature (686)..(686): n is a, c, g, or t
  misc_feature (771)..(771): n is a, c, g, or t
  misc_feature (854)..(854): n is a, c, g, or t
  misc_feature (864)..(864): n is a, c, g, or t
  misc_feature (884)..(884): n is a, c, g, or t
  misc_feature (891)..(891): n is a, c, g, or t
  misc_feature (894)..(894): n is a, c, g, or t
  misc_feature (904)..(904): n is a, c, g, or t
  misc_feature (917)..(917): n is a, c, g, or t
  misc_feature (924)..(924): n is a, c, g, or t
  misc_feature (934)..(934): n is a, c, g, or t
  misc_feature (937)..(937): n is a, c, g, or t
  misc_feature (942)..(943): n is a, c, g, or t
  misc_feature (946)..(946): n is a, c, g, or t
  misc_feature (950)..(951): n is a, c, g, or t
  misc_feature (954)..(954): n is a, c, g, or t
  misc_feature (966)..(966): n is a, c, g, or t
  misc_feature (972)..(973): n is a, c, g, or t
  misc_feature (977)..(977): n is a, c, g, or t
  misc_feature (983)..(983): n is a, c, g, or t
  misc_feature (990)..(990): n is a, c, g, or t
  misc_feature (995)..(995): n is a, c, g, or t
  misc_feature (1003)..(1003): n is a, c, g, or t
gagcggctggagcagctcggcgcccagcgcatctttgagctggggttgggcgacgacgatgggaacttggaggaggacttcatcacctggcgagagcagttctggccggccgtgtgtgaacactttggggtggaagccactggcgaggagtccagcattcgccagtacgagcttgtggtccacaccgacatagatgcggccaaggtgtacatgggggagatgggccggctgaagagctacgagaaccagaagcccccctttgatgccaagaatccgttcctggctgcagtcaccaccaaccggaagctgaaccagggaaccgagcgccacctcatgcacctggaattggacatctcggactccaaaatcaggtatgaatctggggaccacgtggctgtgtacccagccaacgactctgctctcgtcaaccagctgggcaaaatcctgggtgccgacctggacgtcgtcatgtccctgaacaacctggatgaggagtccaacaagaagcacccattcccgtgccctacgtcctaccgcacggccctcacctactacctggacatcaccaacccgccgcgtaccaacgtgctgtacgagctggcgcagtacgcctcggagccctcggagcaggagctgctgcgcaagatggcctcctcctccggcgagggcaaggagctgtacctganctgggtggtggaggcccggaggcacatcctggccatcctgcaggactgcccgtccctgcggccccccatcgaccacctgtgtganctgctgccgcgcctgcaggcccgctactactccatcgcctcatcctccaaggtccaccccaactctgtgcacatctgtgcggnggttgtggantacaaaaccaaggctggccncatcaanaanggcgtggccnccaactggctgcnggccaangaacctgccnggnaaaanngcngccnngcnctggtgcccatnttctgnncaantcccanttccccntgccnttaaggcn

SEQ ID NO: 187 - DNA, 585 bp, Homo sapiens
gccaccgccgaggaaaaccgtgtgctattagccatggtcaaccccaccgtgttcttcgacattgccgtcaacggcgagcccttgggccgcgtctcctttgagctgtttgcagacaaggtcccaaagacagcagaaaattttcgtgctctgagcactggagagaaaggatttggttataagggttcctgctttcacagaattattccagggtttatgtgtcagggtggtgacttcacacgccataatggcactggtggcaagtccatctatggggagaaatttgaagatgagaacttcatcctaaagcatacgggtcctggcatcttgtccatggcaaatgctggacccaacacaaatggttcccagtttttcatctgcactgccaagactgagtggttggatggcaagcatgtggtgtttggcaaagtgaaagaaagcatgaatattgtggaggccatggagcgctttgggtccaggaatggcaagaccagcaagaagatcaccattgctgactgtggacaactcgaataagtttgacttgtgttttatcttaaccaccagatcattccttctgtagctcaggag

SEQ ID NO: 188 - DNA, 788 bp, Homo sapiens
  misc_feature (564)..(564): n is a, c, g, or t
  misc_feature (601)..(601): n is a, c, g, or t
  misc_feature (624)..(624): n is a, c, g, or t
  misc_feature (658)..(658): n is a, c, g, or t
  misc_feature (691)..(691): n is a, c, g, or t
  misc_feature (693)..(693): n is a, c, g, or t
  misc_feature (702)..(702): n is a, c, g, or t
  misc_feature (710)..(711): n is a, c, g, or t
  misc_feature (714)..(714): n is a, c, g, or t
  misc_feature (718)..(718): n is a, c, g, or t
  misc_feature (720)..(720): n is a, c, g, or t
  misc_feature (722)..(722): n is a, c, g, or t
  misc_feature (729)..(729): n is a, c, g, or t
  misc_feature (737)..(738): n is a, c, g, or t
  misc_feature (745)..(745): n is a, c, g, or t
  misc_feature (767)..(767): n is a, c, g, or t
  misc_feature (771)..(771): n is a, c, g, or t
  misc_feature (781)..(782): n is a, c, g, or t
  misc_feature (786)..(786): n is a, c, g, or t
gcccacgcgtccgccgagccggaggggggaaacggcgcccgccgcccgcccggagcccgcgagcaaccccagtcccccccacccgcgcgtggcggcgccggctccctagccaccgcggccccaccctcttccggcctcagctgtccgggctgccttcgcctccgcctgtggatgctgcgcctctccgaacgcaacatgaaggtgctccttgccgccgccctcatcgcggggtccgtcttcttcctgctgctgccgggaccttctgcggccgatgagaagaagaaggggcccaaagtcaccgtcaaggtgtattttgacctacgaattggagatgaagatgtaggccgggtgatctttggtctcttcggaaagactgttccaaaaacagtggataattttgtggccttagctacaggagagaaaggatttggctacaaaaacagcaaattccatcgtgtaatcaaggacttcatgatccagggcggagacttcaccaggggagatggcacaggaggaaagagcatctacggtgagcgcttccccgatgagaacttcaaactgaancactacgggcctggctgggtgagcatggccaacgcangcaaagacaccaacggctcccanttcttcatcacgacagtcaagacagcctggctanatggcaagcatgtggtgtttggcaaagttctananggcatgtangtggtgcnnaangtgnanancaccaanaaagacannccggganaaaacccctgaaggatgtgatnatcncaaactgcgnnaaantt

SEQ ID NO: 189 - DNA, 1201 bp, Homo sapiens
  misc_feature (801)..(801): n is a, c, g, or t
  misc_feature (854)..(854): n is a, c, g, or t
  misc_feature (856)..(856): n is a, c, g, or t
  misc_feature (869)..(869): n is a, c, g, or t
  misc_feature (881)..(881): n is a, c, g, or t
  misc_feature (892)..(892): n is a, c, g, or t
  misc_feature (900)..(900): n is a, c, g, or t
  misc_feature (904)..(904): n is a, c, g, or t
  misc_feature (937)..(937): n is a, c, g, or t
  misc_feature (945)..(945): n is a, c, g, or t
  misc_feature (967)..(967): n is a, c, g, or t
  misc_feature (978)..(978): n is a, c, g, or t
  misc_feature (1013)..(1013): n is a, c, g, or t
  misc_feature (1020)..(1020): n is a, c, g, or t
  misc_feature (1032)..(1032): n is a, c, g, or t
  misc_feature (1034)..(1034): n is a, c, g, or t
  misc_feature (1037)..(1037): n is a, c, g, or t
  misc_feature (1040)..(1040): n is a, c, g, or t
  misc_feature (1046)..(1046): n is a, c, g, or t
  misc_feature (1058)..(1058): n is a, c, g, or t
  misc_feature (1063)..(1063): n is a, c, g, or t
  misc_feature (1071)..(1071): n is a, c, g, or t
  misc_feature (1078)..(1078): n is a, c, g, or t
  misc_feature (1084)..(1084): n is a, c, g, or t
  misc_feature (1089)..(1089): n is a, c, g, or t
  misc_feature (1091)..(1091): n is a, c, g, or t
  misc_feature (1096)..(1096): n is a, c, g, or t
  misc_feature (1103)..(1103): n is a, c, g, or t
  misc_feature (1107)..(1107): n is a, c, g, or t
  misc_feature (1111)..(1112): n is a, c, g, or t
  misc_feature (1123)..(1123): n is a, c, g, or t
  misc_feature (1126)..(1126): n is a, c, g, or t
  misc_feature (1129)..(1129): n is a, c, g, or t
  misc_feature (1149)..(1149): n is a, c, g, or t
  misc_feature (1159)..(1159): n is a, c, g, or t
  misc_feature (1169)..(1169): n is a, c, g, or t
  misc_feature (1173)..(1173): n is a, c, g, or t
  misc_feature (1181)..(1181): n is a, c, g, or t
  misc_feature (1189)..(1189): n is a, c, g, or t
  misc_feature (1193)..(1193): n is a, c, g, or t
  misc_feature (1198)..(1198): n is a, c, g, or t
gcccacgcgtccgatttggatgggaaacatgtggtgtttggccaagtaattaaaggaataggagtggcaaggatattggaaaatgtggaagtgaaaggtgaaaaacctgctaaattgtgcgttattgcagaatgtggagaattgaaggaaggagatgacgggggaatattcccaaaagatggctctggcgacagtcatccagatttccctgaggatgcggatatagatttaaaagatgtagataaaattttattaataacagaagacttaaaaaacattggaaatacttttttcaaatcccagaactgggagatggctattaaaaaatatgcagaagttttaagatacgtggacagttcaaaggctgttattgagacagcagatagagccaagctgcaacctatagctttaagctgtgtactgaatattggtgcttgtaaactgaagatgtcaaattggcagggagcaattgacagttgtttagaggctcttgaactagacccatcaaataccaaagcattgtaccgcagagctcaaggatggcaaggattaaaagaatatgatcaagcattggctgatcttaagaaagctcaggggatagcaccagaagataaagctatccaggcagaattgctgaaagtcaaacaaaagataaaggcacagaaagataaagagaaggcagtatatgcaaaaatgtttgcttagaaaggattcagttttgcttattgtgtgttgattgtataaatgcaataagaaaatgtaaaggtttttgtctatgaatatgatccctaatgtgtttcntttgacaccttagttccttactgtttacagtttaggagtactgatagggggtncntgcttaataaacntgtcccaatacngtaagtaaagnggttttgnttgnttcctttgaaatggagtcttgctctgtcccccnggctggangcgggggcgcaatcccggctcnctgcatccccnggccccccggggtccaagcaattcccccgcccccncctcccnagtagctgggantnacnggncccggncccccccccccncctantttttgtntttttanaaaaanggggntnccccnaattggncccncccnntgggcctgaanccntgnccctgggacccccccccccntggccccccnaagggggggnaaanggggggancccccccncccnccccnaaa

SEQ ID NO: 190 - DNA, 1091 bp, Homo sapiens
  misc_feature (744)..(744): n is a, c, g, or t
  misc_feature (770)..(770): n is a, c, g, or t
  misc_feature (793)..(793): n is a, c, g, or t
  misc_feature (796)..(796): n is a, c, g, or t
  misc_feature (808)..(808): n is a, c, g, or t
  misc_feature (823)..(824): n is a, c, g, or t
  misc_feature (827)..(827): n is a, c, g, or t
  misc_feature (831)..(831): n is a, c, g, or t
  misc_feature (848)..(848): n is a, c, g, or t
  misc_feature (863)..(864): n is a, c, g, or t
  misc_feature (866)..(866): n is a, c, g, or t
  misc_feature (868)..(868): n is a, c, g, or t
  misc_feature (873)..(873): n is a, c, g, or t
  misc_feature (876)..(876): n is a, c, g, or t
  misc_feature (884)..(884): n is a, c, g, or t
  misc_feature (887)..(887): n is a, c, g, or t
  misc_feature (902)..(902): n is a, c, g, or t
  misc_feature (914)..(914): n is a, c, g, or t
  misc_feature (948)..(948): n is a, c, g, or t
  misc_feature (954)..(954): n is a, c, g, or t
  misc_feature (956)..(956): n is a, c, g, or t
  misc_feature (958)..(958): n is a, c, g, or t
  misc_feature (970)..(970): n is a, c, g, or t
  misc_feature (978)..(978): n is a, c, g, or t
  misc_feature (981)..(981): n is a, c, g, or t
  misc_feature (989)..(989): n is a, c, g, or t
  misc_feature (991)..(991): n is a, c, g, or t
  misc_feature (1004)..(1004): n is a, c, g, or t
  misc_feature (1041)..(1041): n is a, c, g, or t
  misc_feature (1047)..(1047): n is a, c, g, or t
  misc_feature (1052)..(1052): n is a, c, g, or t
  misc_feature (1059)..(1059): n is a, c, g, or t
  misc_feature (1064)..(1064): n is a, c, g, or t
  misc_feature (1068)..(1068): n is a, c, g, or t
  misc_feature (1071)..(1071): n is a, c, g, or t
  misc_feature (1081)..(1082): n is a, c, g, or t
  misc_feature (1085)..(1085): n is a, c, g, or t
  misc_feature (1088)..(1088): n is a, c, g, or t
gtgtccgacagcgagaagctcaacctggactcgatcatcgggcgcctgctggaagtgcagggctcgcggcctggcaagaatgtacagctgacagagaacgagatccgcggtctgtgcctgaaatcccgggagatttttctgagccagcccattcttctggagctggaggcacccctcaagatctgcggtgacatacacggccagtactacgaccttctgcgactatttgagtatggcggtttccctcccgagagcaactacctctttctgggggactatgtggacaggggcaagcagtccttggagaccatctgcctgctgctggcctataagatcaagtaccccgagaacttcttcctgctccgtgggaaccacgagtgtgccagcatcaaccgcatctatggtttctacgatgagtgcaagagacgctacaacatcaaactgtggaaaaccttcactgactgcttcaactgcctgcccatcgcggccatagtggacgaaaagatcttctgctgccacggaggcctgtccccggacctgcagtctatggagcagattcggcggatcatgcggcccacagatgtgcctgaccagggcctgctgtgtgacctgctgtggtctgaccctgacaaggacgtgcagggctggggcgagaacgaccgtggcgtctctttttacctttggagccgaggtggtggccaagttcctccacaagcacgacttggaacctcatctgccgagcanacaaggtggtaaaaaaaggctacaanttctttgccaagcggcactgggnganactttttctcancttccaactaacggnnggnaaantttgaaaaatgctggcncccatgaatgaatgnngnanaaaanccnccatgggnccnctttccaaaatcccncaaacccccccnaaaaaaaaaaaaagggggaaaataacggggcaantttcantngncctgaaaacccntggagggnccnaacccttncncccccacccccgnaaatttccccccaaaaaccaaaaaaaaaaccccccgnaaaaanaaccntgggggnccccnaaanaantggaatttgnnttnttnaaa

SEQ ID NO: 191 - DNA, 1060 bp, Homo sapiens
  misc_feature (785)..(785): n is a, c, g, or t
  misc_feature (799)..(799): n is a, c, g, or t
  misc_feature (823)..(823): n is a, c, g, or t
  misc_feature (850)..(850): n is a, c, g, or t
  misc_feature (875)..(875): n is a, c, g, or t
  misc_feature (878)..(878): n is a, c, g, or t
  misc_feature (896)..(896): n is a, c, g, or t
  misc_feature (900)..(900): n is a, c, g, or t
  misc_feature (909)..(909): n is a, c, g, or t
  misc_feature (925)..(925): n is a, c, g, or t
  misc_feature (929)..(929): n is a, c, g, or t
  misc_feature (939)..(939): n is a, c, g, or t
  misc_feature (955)..(955): n is a, c, g, or t
  misc_feature (958)..(958): n is a, c, g, or t
  misc_feature (962)..(962): n is a, c, g, or t
  misc_feature (965)..(965): n is a, c, g, or t
  misc_feature (976)..(977): n is a, c, g, or t
  misc_feature (980)..(980): n is a, c, g, or t
  misc_feature (986)..(986): n is a, c, g, or t
  misc_feature (996)..(996): n is a, c, g, or t
  misc_feature (1006)..(1007): n is a, c, g, or t
  misc_feature (1013)..(1013): n is a, c, g, or t
  misc_feature (1020)..(1020): n is a, c, g, or t
  misc_feature (1023)..(1023): n is a, c, g, or t
  misc_feature (1025)..(1025): n is a, c, g, or t
  misc_feature (1032)..(1032): n is a, c, g, or t
  misc_feature (1035)..(1035): n is a, c, g, or t
  misc_feature (1042)..(1042): n is a, c, g, or t
  misc_feature (1044)..(1044): n is a, c, g, or t
  misc_feature (1050)..(1050): n is a, c, g, or t
  misc_feature (1054)..(1055): n is a, c, g, or t
ggtgagatcatccccatgttctccaacctggcctctgacgagcaggactcggtgcggctgctggcggtggaggcgtgcgtgaacatcgcccagcttctgccccaggaggatctggaggccctggtgatgcccactctgcgccaggccgctgaagacaagtcctggcgcgtccgctacatggtggctgacaagttcacagagctccagaaagcagtggggcctgagatcaccaagacagacctggtccctgccttccagaacctgatgaaagactgtgaggccgaggtgagggccgcagcctcccacaaggtcaaagagttctgtgaaaacctctcagctgactgtcgggagaatgtgatcatgtcccagatcttgccctgcatcaaggagctggtgtccgatgccaaccaacatgtcaagtctgccctggcctcagtcatcatgggtctctctcccatcttgggcaaagacaacaccatcgagcacctcttgcccctcttcctggctcagctgaaggatgagtgccctgaggtacggctgaacatcatctctaacctggactgtgtgaacgaggtgattggcatccggcagctgtcccagtccctgctccctgccattgtggagctggctgaggacgccaagtggcgggtgcggctggccatcattgagtacatgcccctcctggctggacagctgggagtggagttctttgatgaaaaacttaactccttgtgcatggcctggcttgtggatcatgtatatgccatccgcgaggcagccaccancaacctgaaaaaanctagtggaaaagtttgggaaggantgggcccatgccacaatcatccccaanggtcttggccatgtccggaaacccnaantaacttgcaccgcatgantacnctcttttgnatcaatgtgctgtctnaagnctgtgggcangaaatccccccccaanccnatgntancccacggtttnngcncatggntggggaaccngttgccaatnntccccnttcaagnggncnaaatctntgnaaaaaananggcccntccnngaaaa

SEQ ID NO: 192 - DNA, 951 bp, Homo sapiens
  misc_feature (621)..(621): n is a, c, g, or t
  misc_feature (648)..(648): n is a, c, g, or t
  misc_feature (752)..(752): n is a, c, g, or t
  misc_feature (766)..(766): n is a, c, g, or t
  misc_feature (773)..(773): n is a, c, g, or t
  misc_feature (777)..(777): n is a, c, g, or t
  misc_feature (781)..(781): n is a, c, g, or t
  misc_feature (786)..(786): n is a, c, g, or t
  misc_feature (800)..(800): n is a, c, g, or t
  misc_feature (806)..(806): n is a, c, g, or t
  misc_feature (810)..(810): n is a, c, g, or t
  misc_feature (813)..(813): n is a, c, g, or t
  misc_feature (835)..(835): n is a, c, g, or t
  misc_feature (837)..(837): n is a, c, g, or t
  misc_feature (840)..(840): n is a, c, g, or t
  misc_feature (842)..(842): n is a, c, g, or t
  misc_feature (845)..(846): n is a, c, g, or t
  misc_feature (851)..(851): n is a, c, g, or t
  misc_feature (860)..(860): n is a, c, g, or t
  misc_feature (865)..(865): n is a, c, g, or t
  misc_feature (873)..(873): n is a, c, g, or t
  misc_feature (879)..(879): n is a, c, g, or t
  misc_feature (884)..(885): n is a, c, g, or t
  misc_feature (898)..(898): n is a, c, g, or t
  misc_feature (902)..(902): n is a, c, g, or t
  misc_feature (907)..(907): n is a, c, g, or t
  misc_feature (926)..(926): n is a, c, g, or t
  misc_feature (931)..(931): n is a, c, g, or t
  misc_feature (933)..(933): n is a, c, g, or t
  misc_feature (935)..(935): n is a, c, g, or t
  misc_feature (939)..(939): n is a, c, g, or t
  misc_feature (946)..(946): n is a, c, g, or t
gggtcgctttgcggcatggcgatggcggagggcgagaggactgagtgtgctgagcccccccgggacgaacccccggctgatggagctctgaagcgggcagaggagctcaagactcaggccaatgactacttcaaagccaaggactacgagaacgccatcaagttctacagccaggccatcgagctgaaccccagcaatgccatctactatggcaaccgcagcctggcctacctgcgcactgagtgctatggctacgcgctgggagacgccacgcgggccattgagctggacaagaagtacatcaagggttattaccgccgggctgccagcaacatggcactgggcaagttccgggccgcgctgcgagactacgagacggtggtcaaggtgaagccccatgacaaggatgccaaaatgaaataccaggagtgcaacaagatcgtgaagcagaaggcctttgagcgggccatcgcgggcgacgagcacaagcgctccgtggtggactcgctggacatcgagagcatgaccattgaggatgagtacagcggacccaagcttgaagacggcaaagtgacaatcagtttcatgaaggagctcatgcagtggtacaaggaccagaanaaactgcaccggaaatgtgcctaccanacagaaaaaaattacagtatgtggggacacccatggccagttctatgacctcctcaacatattcgagctcaacggtttacccttcggaaacccaacccctatanatttaatggtgaantttgtgnaccnaagnctccnttttctgtaaaaantgatcntccnccnttttcggctttcaagctcctgnanccnanatnnctttnccctccttncaggncaaccccnaaacanaaaannttgaacccaaatnttcngtttncaagggggagggggaaagnccaantnancccnccccaanttttc

SEQ ID NO: 193 - DNA, 1084 bp, Homo sapiens
  misc_feature (751)..(751): n is a, c, g, or t
  misc_feature (815)..(815): n is a, c, g, or t
  misc_feature (834)..(834): n is a, c, g, or t
  misc_feature (840)..(840): n is a, c, g, or t
  misc_feature (907)..(907): n is a, c, g, or t
  misc_feature (920)..(920): n is a, c, g, or t
  misc_feature (929)..(929): n is a, c, g, or t
  misc_feature (953)..(953): n is a, c, g, or t
  misc_feature (971)..(973): n is a, c, g, or t
  misc_feature (979)..(979): n is a, c, g, or t
  misc_feature (982)..(982): n is a, c, g, or t
  misc_feature (990)..(990): n is a, c, g, or t
  misc_feature (1004)..(1005): n is a, c, g, or t
  misc_feature (1023)..(1023): n is a, c, g, or t
  misc_feature (1033)..(1033): n is a, c, g, or t
  misc_feature (1055)..(1055): n is a, c, g, or t
  misc_feature (1059)..(1059): n is a, c, g, or t
  misc_feature (1064)..(1064): n is a, c, g, or t
  misc_feature (1071)..(1071): n is a, c, g, or t
  misc_feature (1073)..(1073): n is a, c, g, or t
  misc_feature (1076)..(1076): n is a, c, g, or t
  misc_feature (1080)..(1081): n is a, c, g, or t
  misc_feature (1084)..(1084): n is a, c, g, or t
gccaagaacgtgctcttcgctcacctggatgacaacgagaggagtgacatattcgatgccatgttccctgtcactcacatcgctggggagactgttatacagcaagggaatgaaggagacaacttctatgtcgttgatcaaggggaagtggatgtgtacgtgaacggagagtgggtgaccaacatcagcgagggaggcagcttcggggagctggcgctcatctacggcacccccagggctgcgaccgtgaaagccaagacggacctcaagctctgggggatcgaccgggacagctaccggcgcatccttatgggcagcacgctgaggaaacgcaagatgtacgaggagttcctcagcaaggtctccatcctagagtccctggagaagtgggagcgtctgaccgtggcggatgcgctggagcccgtccagtttgaagatggagagaaaattgtggtccagggagagcctggggacgacttttacatcatcacggagggcaccgcgtccgtgctgcagcgccggtcccccaatgaggagtacgtggaggtggggcgcctgggaccctctgactacttcggggagattgcactgctgctgaaccggccccgggcggccactgtcgtggcccgggggcccctcaagtgtgtgaagctggaccggccccgcttcgagcgtgtgctggggccctgctctgagatcctcaagaggaacattcagcgttacaacagcttcatctccctcaccgtctgancacagctcccgccctgcagccccagctccccagtgtggtggccgtgccctgctcgtctgtgtcnggggccccggaaccccctntgtgangtgtgggccgggtggggctgggtcccggcacgtgaggactgccccttccccggactcccttttttgnaataaatgatccnccttgtgcnttttcaaatcaaaagaaaagcggnacaaaatgcctcccaaannnaggaanggnaagggcanttttctcccaaaanncctcccgggttgcctttnggggttttcnttggggggcccccccccccctnccanttccntggaaangnttnaaannggn

SEQ ID NO: 194 - DNA, 934 bp, Homo sapiens
  misc_feature (566)..(566): n is a, c, g, or t
  misc_feature (664)..(664): n is a, c, g, or t
  misc_feature (682)..(682): n is a, c, g, or t
  misc_feature (700)..(700): n is a, c, g, or t
  misc_feature (715)..(715): n is a, c, g, or t
  misc_feature (724)..(724): n is a, c, g, or t
  misc_feature (726)..(726): n is a, c, g, or t
  misc_feature (732)..(732): n is a, c, g, or t
  misc_feature (735)..(735): n is a, c, g, or t
  misc_feature (738)..(738): n is a, c, g, or t
  misc_feature (752)..(752): n is a, c, g, or t
  misc_feature (770)..(770): n is a, c, g, or t
  misc_feature (776)..(776): n is a, c, g, or t
  misc_feature (788)..(788): n is a, c, g, or t
  misc_feature (793)..(793): n is a, c, g, or t
  misc_feature (814)..(814): n is a, c, g, or t
  misc_feature (821)..(821): n is a, c, g, or t
  misc_feature (823)..(823): n is a, c, g, or t
  misc_feature (843)..(843): n is a, c, g, or t
  misc_feature (847)..(847): n is a, c, g, or t
  misc_feature (857)..(858): n is a, c, g, or t
  misc_feature (863)..(864): n is a, c, g, or t
  misc_feature (876)..(876): n is a, c, g, or t
  misc_feature (884)..(884): n is a, c, g, or t
  misc_feature (899)..(900): n is a, c, g, or t
  misc_feature (909)..(909): n is a, c, g, or t
  misc_feature (912)..(913): n is a, c, g, or t
  misc_feature (920)..(920): n is a, c, g, or t
  misc_feature (925)..(925): n is a, c, g, or t
  misc_feature (928)..(928): n is a, c, g, or t
gcggacgcgtgggcgccgccctccgctccgctcggctcgggctcggctcgggcgcgggcgcggggcgcggggctgggcccgggcggagcggcggctgctccggacatgtcgggccctcgcgccggcttctaccggcaggagctgaacaagaccgtgtgggaggtgccgcagcggctgcaggggctgcgcccggtgggctccggcgcctacggctccgtctgttcggcctacgacgcccggctgcgccagaaggtggcggtgaagaagctgtcgcgccccttccagtcgctgatccacgcgcgcagaacgtaccgggagctgcggctgctcaagcacctgaagcacgagaacgtcatcgggcttctggacgtcttcacgccggccacgtccatcgaggacttcagcgaagtgtacttggtgaccaccctgatgggcgccgacctgaacaacatcgtcaagtgccaggcgctgagcgacgagcacgttcaattcctggtttaccagctgctgcgcgggctgaagtacatccactcggccgggatcatccaccgggacctgaagcccancaacgtggctgtgaacgaggactgtgagctcaggatcctggatttcgggctggcgcgccaggcggacgaaggagatgaccggctatgtggccacgcgntggtaccgggcacctganatcatgctcaactggatncattacaaaccaaanagtggattntntgggtnccntgngctgcatcattggnttaaactgcttccaaggnaaaggntccttcttcccnggaanccgaactaaaatttaaccaantttaaancnccaatcaaggaaaatgggtngggnaaaacccaannccttnnagatttttgganaaaaaatntcctccgaaaaaaanntgaatttgnttnncccgcanaaacnaanaaaatt

SEQ ID NO: 195 - DNA, 1021 bp, Homo sapiens
  misc_feature (130)..(130): n is a, c, g, or t
  misc_feature (711)..(711): n is a, c, g, or t
  misc_feature (714)..(714): n is a, c, g, or t
  misc_feature (719)..(719): n is a, c, g, or t
  misc_feature (721)..(721): n is a, c, g, or t
  misc_feature (730)..(730): n is a, c, g, or t
  misc_feature (736)..(736): n is a, c, g, or t
  misc_feature (792)..(792): n is a, c, g, or t
  misc_feature (795)..(795): n is a, c, g, or t
  misc_feature (830)..(830): n is a, c, g, or t
  misc_feature (833)..(833): n is a, c, g, or t
  misc_feature (840)..(840): n is a, c, g, or t
  misc_feature (847)..(847): n is a, c, g, or t
  misc_feature (881)..(881): n is a, c, g, or t
  misc_feature (886)..(887): n is a, c, g, or t
  misc_feature (897)..(898): n is a, c, g, or t
  misc_feature (901)..(901): n is a, c, g, or t
  misc_feature (913)..(914): n is a, c, g, or t
  misc_feature (916)..(916): n is a, c, g, or t
  misc_feature (923)..(923): n is a, c, g, or t
  misc_feature (925)..(925): n is a, c, g, or t
  misc_feature (948)..(948): n is a, c, g, or t
  misc_feature (967)..(967): n is a, c, g, or t
  misc_feature (977)..(977): n is a, c, g, or t
  misc_feature (979)..(979): n is a, c, g, or t
  misc_feature (996)..(997): n is a, c, g, or t
  misc_feature (1003)..(1003): n is a, c, g, or t
  misc_feature (1005)..(1005): n is a, c, g, or t
  misc_feature (1014)..(1014): n is a, c, g, or t
  misc_feature (1021)..(1021): n is a, c, g, or t
gcccacgcgtccgtgcacctctgctctggcacgcggctgcctgcactgaccgttcacgtgactcagccaaaggacggtggcttctgcgaagtgtgcaagaagctggtgggttatttggatcgcaacctgnagaaaaacagcaccaagcaggagatcctggctgctcttgagaaaggctgcagcttcctgccagacccttaccagaagcagtgtgatcagtttgtggcagagtacgagcccgtgctgatcgagatcctggtggaggtgatggatccttccttcgtgtgcttgaaaattggagcctgcccctcggcccataagcccttgttgggaactgagaagtgtatatggggcccaagctactggtgccagaacacagagacagcagcccagtgcaatgctgtcgagcattgcaaacgccatgtgtggaactaggaggaggaatattccatcttggcagaaaccacagcattggtttttttctacttgtgtgtctgggggaatgaacgcacagatctgtttgactttgttataaaaatagggctcccccacctcccccatttctgtgtcctttattgtagcattgctgtctgcaagggagcccctagcccctggcagacatagctgcttcagtgccccttttctctctgctagatggatgttgatgcactggaggtcttttagcctgcccttgcatggcgcctgctggangangaaananctctgctgncatganccacagtttcttgactggaggccatcaacccctcttggttgaggccttgttctganccntgaaatgtgcttgggcactggtgggcctgggcttnttnaagtggnctcctgncctgatcagggaccctccccgctttcctgggccntctcnnttgaacaaanncanccaaaccaaagnngnttttatntnaaaaattaaaaacctggaaaaanccggcttttttaaagatgntattcccccngnaaaaccaaggaattttnnaaaccncntctgggggnttggaan

SEQ ID NO: 196 - DNA, 881 bp, Homo sapiens
  misc_feature (776)..(776): n is a, c, g, or t
  misc_feature (850)..(850): n is a, c, g, or t
  misc_feature (858)..(858): n is a, c, g, or t
  misc_feature (868)..(868): n is a, c, g, or t
gggcagccatctcgccgtgagacagcaagtgtcggatccgcaggcgcagccgtgcgatgttgtcctctacagccatgtattcggctgctggcagagacttggggatggaaccgcacagagccgcgggccctttgcagctgcgattttcgccctacgttttcaacggaggtactatactggcaattgctggagaagattttgcaattgttgcttctgatactcgattgagtgaagggttttcaattcatacgcgggatagccccaaatgttacaaattaacagacaaaacagtcattggatgcagcggttttcatggagactgtcttacgctgacaaagattattgaagcaagactaaagatgtataagcattccaataataaggccatgactacgggggcaattgctgcaatgctgtctacaatcctgtattcaaggcgcttctttccatactatgtttacaacatcatcggtggacttgatgaagaaggaaagggggctgtatacagctttgatccagtagggtcttaccagagagactccttcaaggctggaggctcagcaagtgccatgctacagcccctgcttgacaaccaggttggttttaagaacatgcagaatgtggagcatgttccgctgtccttggacagagccatgcggctggtgaaagatgtcttcatttctgcggctgagagagatgtgtacactggggacgcactccggatctgcatagtgaccaaagagggcatcagggaggaaactgtttccttaaggaangactgatctgtgtgctcttatcaccaatcagttcaaacctggttgattttgtactttggaactgtaccttggangggtttgnttattaaaanaaaaacctgaagt

SEQ ID NO: 197 - DNA, 1082 bp, Homo sapiens
  misc_feature (781)..(781): n is a, c, g, or t
  misc_feature (783)..(783): n is a, c, g, or t
  misc_feature (850)..(850): n is a, c, g, or t
  misc_feature (873)..(873): n is a, c, g, or t
  misc_feature (884)..(884): n is a, c, g, or t
  misc_feature (899)..(899): n is a, c, g, or t
  misc_feature (924)..(924): n is a, c, g, or t
  misc_feature (935)..(935): n is a, c, g, or t
  misc_feature (945)..(945): n is a, c, g, or t
  misc_feature (966)..(966): n is a, c, g, or t
  misc_feature (975)..(975): n is a, c, g, or t
  misc_feature (989)..(989): n is a, c, g, or t
  misc_feature (996)..(996): n is a, c, g, or t
  misc_feature (999)..(999): n is a, c, g, or t
  misc_feature (1023)..(1023): n is a, c, g, or t
  misc_feature (1038)..(1038): n is a, c, g, or t
  misc_feature (1040)..(1040): n is a, c, g, or t
  misc_feature (1049)..(1049): n is a, c, g, or t
  misc_feature (1053)..(1053): n is a, c, g, or t
  misc_feature (1058)..(1059): n is a, c, g, or t
  misc_feature (1061)..(1061): n is a, c, g, or t
  misc_feature (1066)..(1067): n is a, c, g, or t
  misc_feature (1071)..(1071): n is a, c, g, or t
  misc_feature (1075)..(1075): n is a, c, g, or t
  misc_feature (1079)..(1079): n is a, c, g, or t
gagcctctcaaatttctgcgtccacactatggcaaactgaaggaaatctatgagaacatggcccctggggagaataagcgttttgctgctgacatcatctccgttttggccatgaccatgagtggggagcgtgagtgcctcaagtatcggctagtgggctcccaggaggaattggcatcatggggtcatgagtatgtcaggcatctggcaggagaagtggctaaggagtggcaggagctggatgacgcagagaaggtccagcgggagcctctgctcactctggtgaaggaaatcgtcccctataacatggcccacaatgcagagcatgaggcttgcgacctgcttatggaaattgagcaggtggacatgctggagaaggacattgatgaaaatgcatatgcaaaggtctgcctttatctcaccagttgtgtgaattacgtgcctgagcctgagaactcagccctactgcgttgtgccctgggtgtgttccgaaagtttagccgcttccctgaagctctgagattggcattgatgctcaatgacatggagttggtagaagacatcttcacctcctgcaaggatgtggtagtacagaaacagatggcattcatgctaggccggcatggggtgttcctggagctgagtgaagatgtcgaggagtatgaggacctgacagagatcatgtccaatgtacagctcaacagcaacttcttggccttagctcgggagctggacatcatggagcccaaggtgcctgatgacatctacaaaacccacctananaacaacaggtttgggggcagtggctctcaggtggactctgccccgcatgaacctggcctcctctttngtgaatggctttgtgaatgcacnttttggccaanacaagctgctaacanatgatggcaacaatggctttacaanaacaaggaccncggaatgttnaatgcacctgcctcccttggnatgattccnctgtgggaatgtgnatggggnccncccccaaatgacaatacctgtacncccctgaagaatacntnaatcaggancctnttttnncnggggnnaaangaanctcnggg

SEQ ID NO: 198 - DNA, 1104 bp, Homo sapiens
  misc_feature (768)..(768): n is a, c, g, or t
  misc_feature (787)..(787): n is a, c, g, or t
  misc_feature (799)..(799): n is a, c, g, or t
  misc_feature (817)..(817): n is a, c, g, or t
  misc_feature (822)..(822): n is a, c, g, or t
  misc_feature (837)..(837): n is a, c, g, or t
  misc_feature (844)..(844): n is a, c, g, or t
  misc_feature (865)..(865): n is a, c, g, or t
  misc_feature (867)..(867): n is a, c, g, or t
  misc_feature (878)..(878): n is a, c, g, or t
  misc_feature (895)..(895): n is a, c, g, or t
  misc_feature (906)..(906): n is a, c, g, or t
  misc_feature (919)..(919): n is a, c, g, or t
  misc_feature (921)..(921): n is a, c, g, or t
  misc_feature (925)..(925): n is a, c, g, or t
  misc_feature (938)..(938): n is a, c, g, or t
  misc_feature (941)..(941): n is a, c, g, or t
  misc_feature (948)..(948): n is a, c, g, or t
  misc_feature (950)..(950): n is a, c, g, or t
  misc_feature (955)..(955): n is a, c, g, or t
  misc_feature (971)..(971): n is a, c, g, or t
  misc_feature (980)..(980): n is a, c, g, or t
  misc_feature (982)..(982): n is a, c, g, or t
  misc_feature (999)..(1000): n is a, c, g, or t
  misc_feature (1005)..(1005): n is a, c, g, or t
  misc_feature (1011)..(1011): n is a, c, g, or t
  misc_feature (1020)..(1020): n is a, c, g, or t
  misc_feature (1028)..(1028): n is a, c, g, or t
  misc_feature (1030)..(1031): n is a, c, g, or t
  misc_feature (1043)..(1043): n is a, c, g, or t
  misc_feature (1053)..(1053): n is a, c, g, or t
  misc_feature (1057)..(1057): n is a, c, g, or t
  misc_feature (1069)..(1069): n is a, c, g, or t
  misc_feature (1081)..(1083): n is a, c, g, or t
  misc_feature (1088)..(1090): n is a, c, g, or t
  misc_feature (1092)..(1092): n is a, c, g, or t
  misc_feature (1095)..(1101): n is a, c, g, or t
  misc_feature (1103)..(1104): n is a, c, g, or t
ggggcgtcgtccctagcccgggagccgggtctctggagtcgcggcccggggttcacgatgtccgacgaggaagcgaggcagagcggaggctcctcgcaggccggcgccgtgactgtcagcgacgtccaggagctgatgcggcgcaaggaggagatagaagcgcagatcaaggccaactatgacgtgctggaaagccaaaaaggcattgggatgaacgagccgctggtggactgtgagggctacccccggtcagacgtggacctgtaccaagtccgcaccgccaggcacaacatcatatgcctgcagaatgatcacaaggcagtgatgaagcaggtggaggaggccctgcaccagctgcacgctcgcgacaaggagaagcaggcccgggacatggctgaggcccacaaagaggccatgagccgcaaactgggtcagagtgagagccagggccctccacgggccttcgccaaagtgaacagcatcagccccggctccccagccagcatcgcgggtctgcaagtggatgatgagattgtggagttcggctctgtgaacacccagaacttccagtcactgcataacattggcagtgtggtgcagcacagtgaggggaagcccctgaatgtgacagtgatccgcaggggggaaaaacaccagcttagacttgttccaacacgctgggcaggaaaaggactgctgggctgcaacattattcctctgcaaagatgattgtccctggggaacagttaacaggaaaagcatcttccnttgccctggacttggggtntagggattttcnaactttgtcttctctccntgaancataaaggattctgnaaaaagnctttgtaaccttgaacttctntntggtgggcaantacttgtggccccaccnattgtaattcnccctggaattaangnattnttaaaaaacttangcnttggccntntttcncaaaattaggccccgncccctaaanangaaatttccctggattnntgggncaattnggcggaaantttttttngnnaggacctggggnggaattattnattnttttttttaaanaaaaaatttttnnnggggnnnanaannnnnnnann

SEQ ID NO: 199 - DNA, 1108 bp, Homo sapiens
  misc_feature (744)..(744): n is a, c, g, or t
  misc_feature (793)..(793): n is a, c, g, or t
  misc_feature (810)..(810): n is a, c, g, or t
  misc_feature (818)..(818): n is a, c, g, or t
  misc_feature (839)..(839): n is a, c, g, or t
  misc_feature (852)..(852): n is a, c, g, or t
  misc_feature (854)..(854): n is a, c, g, or t
  misc_feature (858)..(858): n is a, c, g, or t
  misc_feature (865)..(865): n is a, c, g, or t
  misc_feature (871)..(871): n is a, c, g, or t
  misc_feature (873)..(873): n is a, c, g, or t
  misc_feature (887)..(887): n is a, c, g, or t
  misc_feature (904)..(904): n is a, c, g, or t
  misc_feature (908)..(908): n is a, c, g, or t
  misc_feature (912)..(912): n is a, c, g, or t
  misc_feature (920)..(920): n is a, c, g, or t
  misc_feature (922)..(922): n is a, c, g, or t
  misc_feature (924)..(924): n is a, c, g, or t
  misc_feature (929)..(929): n is a, c, g, or t
  misc_feature (933)..(933): n is a, c, g, or t
  misc_feature (941)..(941): n is a, c, g, or t
  misc_feature (944)..(944): n is a, c, g, or t
  misc_feature (955)..(955): n is a, c, g, or t
  misc_feature (967)..(967): n is a, c, g, or t
  misc_feature (982)..(982): n is a, c, g, or t
  misc_feature (996)..(996): n is a, c, g, or t
  misc_feature (1005)..(1005): n is a, c, g, or t
  misc_feature (1016)..(1016): n is a, c, g, or t
  misc_feature (1019)..(1019): n is a, c, g, or t
  misc_feature (1023)..(1023): n is a, c, g, or t
  misc_feature (1028)..(1028): n is a, c, g, or t
  misc_feature (1030)..(1030): n is a, c, g, or t
  misc_feature (1039)..(1039): n is a, c, g, or t
  misc_feature (1049)..(1050): n is a, c, g, or t
  misc_feature (1066)..(1066): n is a, c, g, or t
  misc_feature (1074)..(1074): n is a, c, g, or t
  misc_feature (1088)..(1088): n is a, c, g, or t
  misc_feature (1096)..(1096): n is a, c, g, or t
  misc_feature (1107)..(1107): n is a, c, g, or t
gcccacgcgtccggggacagcgaaatggaggggtgtgtgtctaacctaatggtctgcaacctggcctacagcgggaagctggaagagttgaaggagagtattctggccgataaatccctggctactagaactgaccaggacagcagaactgcattgcactgggcatgctcagctggacatacagaaattgttgaatttttgttgcaacttggagtgccagtgaatgataaagacgatgcaggttggtctcctcttcatattgcggcttctgctggccgggatgagattgtaaaagcccttctgggaaaaggtgctcaagtgaatgctgtcaatcaaaatggctgtactcccttacattatgcagcttcgaaaaacaggcatgagatcgctgtcatgttactggaaggcggggctaatccagatgctaaggaccattatgaggctacagcaatgcaccgggcagcagccaagggtaacttgaagatgattcatatccttctgtactacaaagcatccacaaacatccaagacactgagggtaacactcctctacacttagcctgtgatgaggagagagtggaagaagcaaaactgctggtgtcccaaggagcaagtatttacattgagaataaagaagaaaagacacccctgcaagtggccaaaggtggcctgggtttaatactcaagagaatggtggaaggttaaacagcttggatttattcttactttgtatgttgtggttgntgtcccccagtgtccctacaaactaatgtatttgtgcaccaagacatcntctatgaatgatgaaanttttctcncctttcaaagtcttataaacnatgttgactcctngntccngcctganttactngntccaaaccttacanccttgtttttccaggcnatcnaaanaactgttngnanaatgnttcnaccggtgnccnaaaattcctcnaaattgaattcngggttaaatttgaanaaactaaattctgnggctgttgngaagccttcanccncccnccccngnaaccctaanaacccccccnncaaaacaaaaaaaccnccaaaaancaacaacctaattntttccccnaaagttttcang

SEQ ID NO: 200 - DNA, 1107 bp, Homo sapiens
  misc_feature (787)..(787): n is a, c, g, or t
  misc_feature (793)..(793): n is a, c, g, or t
  misc_feature (796)..(796): n is a, c, g, or t
  misc_feature (818)..(818): n is a, c, g, or t
  misc_feature (849)..(849): n is a, c, g, or t
  misc_feature (861)..(861): n is a, c, g, or t
  misc_feature (890)..(890): n is a, c, g, or t
  misc_feature (902)..(902): n is a, c, g, or t
  misc_feature (905)..(905): n is a, c, g, or t
  misc_feature (928)..(928): n is a, c, g, or t
  misc_feature (930)..(930): n is a, c, g, or t
  misc_feature (949)..(950): n is a, c, g, or t
  misc_feature (976)..(976): n is a, c, g, or t
  misc_feature (991)..(992): n is a, c, g, or t
  misc_feature (1009)..(1009): n is a, c, g, or t
  misc_feature (1018)..(1018): n is a, c, g, or t
  misc_feature (1031)..(1031): n is a, c, g, or t
  misc_feature (1034)..(1034): n is a, c, g, or t
  misc_feature (1039)..(1039): n is a, c, g, or t
  misc_feature (1045)..(1045): n is a, c, g, or t
  misc_feature (1051)..(1051): n is a, c, g, or t
  misc_feature (1059)..(1059): n is a, c, g, or t
  misc_feature (1063)..(1063): n is a, c, g, or t
  misc_feature (1068)..(1068): n is a, c, g, or t
  misc_feature (1075)..(1075): n is a, c, g, or t
  misc_feature (1078)..(1078): n is a, c, g, or t
  misc_feature (1085)..(1087): n is a, c, g, or t
  misc_feature (1092)..(1092): n is a, c, g, or t
  misc_feature (1101)..(1104): n is a, c, g, or t
gcccacgcgtccggcacttgcagaactcatcagaagccaccccgcttatcagcagatctcaagagagcgttcggtggaggccctgggtctgcacagctcacctccctgggaactgctcgcccgagcgtcggagccggcgctggccccctgcagccggaaggttgcagccgcaggagccccggaggcccaggacacagggctcttgctcttgcagaatccacaggtctttcttgaggaaatctgtagacagaactttgtgctgcgtttttatctagggaaggaacagaagagtgtcgtctcctagaaatctagcactggagaaacgaggaaaattcttccagcgatggtctcccactcagagctgaggaagcttttctactcagcagatgctgtgtgttttgatgttgacagcacggtcatcagagaagaaggaatcgatgagctagccaaaatctgtggcgttgaggacgcggtgtcagaaatgacacggcgagccatgggcggggcagtgcctttcaaagctgctctcacagagcgcttagccctcatccagccctccagggagcaggtgcagagactcatagcagagcaacccccacacctgacccccggcataagggagctggtaagtcgcctacaggagcgaaatgttcaggttttcctaatatctggtggctttaggagtattgtagagcatgttgcttcaaagctcaatatcccagcaaccaatgtatttgccaataggctgaaattctactttaacggtgaatatgcaggttttgatganacgcanccnacagctgaatctggtggaaaanggaaaagtgattaaacttttaaaggaaaaantttcattttaanaaaataatcatgattggagaatggtgccncaaatatggaanccngtcctcctgctgaggctttcatngnattggaagaaaatgtgatnnggcaacaagtcaggaaaacgccaaanggaaatcctgatttnnaaaactgctgggaaaantggaaaaanaaatccttgtcgnaanctccnaaaaanttcaanaaattttnaaanttaanaatgaancgnttgctannntgccnataaacttnnnnaaa

SEQ ID NO: 201 - DNA, 1056 bp, Homo sapiens
  misc_feature (707)..(707): n is a, c, g, or t
  misc_feature (793)..(793): n is a, c, g, or t
  misc_feature (810)..(810): n is a, c, g, or t
  misc_feature (815)..(815): n is a, c, g, or t
  misc_feature (826)..(826): n is a, c, g, or t
  misc_feature (833)..(833): n is a, c, g, or t
  misc_feature (851)..(851): n is a, c, g, or t
  misc_feature (861)..(861): n is a, c, g, or t
  misc_feature (917)..(918): n is a, c, g, or t
  misc_feature (927)..(927): n is a, c, g, or t
  misc_feature (947)..(947): n is a, c, g, or t
  misc_feature (950)..(950): n is a, c, g, or t
  misc_feature (953)..(953): n is a, c, g, or t
  misc_feature (964)..(965): n is a, c, g, or t
  misc_feature (973)..(973): n is a, c, g, or t
  misc_feature (981)..(981): n is a, c, g, or t
  misc_feature (992)..(992): n is a, c, g, or t
  misc_feature (994)..(994): n is a, c, g, or t
  misc_feature (996)..(996): n is a, c, g, or t
  misc_feature (1002)..(1003): n is a, c, g, or t
  misc_feature (1008)..(1009): n is a, c, g, or t
  misc_feature (1012)..(1012): n is a, c, g, or t
  misc_feature (1016)..(1016): n is a, c, g, or t
  misc_feature (1031)..(1031): n is a, c, g, or t
  misc_feature (1037)..(1037): n is a, c, g, or t
  misc_feature (1043)..(1043): n is a, c, g, or t
  misc_feature (1048)..(1048): n is a, c, g, or t
ggccgtgactacacacgcccagacctgccttccggggacagccagccctcgctggaccagaccatggccgcggccttcggcctttccgttccgaacgtccacggcgccctggcccccctggccatcccctcggcggcggcggcagctgcggcggcaggtcggatcgccatcccgggcctggcgggggcaggaaattctgtattgctggtcagcaacctcaacccagagagagtcacaccccaaagcctctttattcttttcggcgtctacggtgacgtgcagcgcgtgaagatcctgttcaataagaaggagaacgccctagtgcagatggcggacggcaaccaggcccagctggccatgagccacctgaacgggcacaagctgcacgggaagcccatccgcatcacgctctcgaagcaccagaacgtgcagctgccccgcgagggccaggaggaccagggcctgaccaaggactacggcaactcacccctgcaccgcttcaagaagccgggctccaagaacttccagaacatattcccgccctcggccacgctgcacctctccaacatcccgccctcagtctccgaggaggatctcaaggtcctgttttccagcaatgggggcgtcgtcaaaggattcaagttcttccagaaggaccgcaagatggcactgatccagatgggctccgtggaggaggcggtccaggncctcattgacctgcacaaccacgacctcggggagaaccaccacctgcgggtctcctttctccaagtccaaccatctaggggcacanggcccccacggccgggnccccntggcgacaaanttccatnattccaaaaaaaagccantttaaaaaanagctgaagtgaccttaacaaaacaaaaaatttttattttttttaaaaaaaaaatcnntttacctgntttttaaaaaaattaaattnaanttnaaccttggctnnaccctggnggggaaanggaaaattcangntntttggnnaattnnggnaacnggaaatttcccgggnccttcnaaaccnggggncaaaaccc

SEQ ID NO: 202 - DNA, 1196 bp, Homo sapiens
  misc_feature (866)..(866): n is a, c, g, or t
  misc_feature (874)..(874): n is a, c, g, or t
  misc_feature (883)..(883): n is a, c, g, or t
  misc_feature (898)..(898): n is a, c, g, or t
  misc_feature (910)..(910): n is a, c, g, or t
  misc_feature (929)..(929): n is a, c, g, or t
  misc_feature (951)..(951): n is a, c, g, or t
  misc_feature (955)..(955): n is a, c, g, or t
  misc_feature (974)..(974): n is a, c, g, or t
  misc_feature (979)..(979): n is a, c, g, or t
  misc_feature (986)..(987): n is a, c, g, or t
  misc_feature (997)..(997): n is a, c, g, or t
  misc_feature (1004)..(1004): n is a, c, g, or t
  misc_feature (1018)..(1018): n is a, c, g, or t
  misc_feature (1034)..(1034): n is a, c, g, or t
  misc_feature (1047)..(1047): n is a, c, g, or t
  misc_feature (1058)..(1058): n is a, c, g, or t
  misc_feature (1070)..(1070): n is a, c, g, or t
  misc_feature (1079)..(1079): n is a, c, g, or t
  misc_feature (1088)..(1088): n is a, c, g, or t
  misc_feature (1090)..(1090): n is a, c, g, or t
  misc_feature (1095)..(1095): n is a, c, g, or t
  misc_feature (1097)..(1097): n is a, c, g, or t
  misc_feature (1103)..(1103): n is a, c, g, or t
  misc_feature (1117)..(1117): n is a, c, g, or t
  misc_feature (1121)..(1121): n is a, c, g, or t
  misc_feature (1130)..(1130): n is a, c, g, or t
  misc_feature (1133)..(1134): n is a, c, g, or t
  misc_feature (1138)..(1138): n is a, c, g, or t
  misc_feature (1141)..(1142): n is a, c, g, or t
  misc_feature (1146)..(1147): n is a, c, g, or t
  misc_feature (1156)..(1156): n is a, c, g, or t
  misc_feature (1168)..(1168): n is a, c, g, or t
  misc_feature (1175)..(1175): n is a, c, g, or t
  misc_feature (1179)..(1179): n is a, c, g, or t
  misc_feature (1183)..(1183): n is a, c, g, or t
ggtcaaaggcaggatcaggttccccgccttccagtccaaaaatcccgccaagagagccccagagcagaggaaaatccaaagtggagagaggggaagaaagagaccagtgagtcatccgtccagaaggcggggagagcagcagcggcccaagcaggagctgcagcgagccgggtacctggactcagcggtagcaacctcgccccttgcaacaaaggcagactgagcgccagagaggacgtttccaactcaaaaatgcaggctcaacagtaccagcagcagcgtcgaaaatttgcagctgccttcttggcattcattttcatactggcagctgtggatactgctgaagcagggaagaaagagaaaccagaaaaaaaagtgaagaagtctgactgtggagaatggcagtggagtgtgtgtgtgcccaccagtggagactgtgggctgggcacacgggagggcactcggactggagctgagtgcaagcaaaccatgaagacccagagatgtaagatcccctgcaactggaagaagcaatttggcgcggagtgcaaataccagttccaggcctggggagaatgtgacctgaacacagccctgaagaccagaactggaagtctgaagcgagccctgcacaatgccgaatgccagaagactgtcaccatctccaagccctgtggcaaactgaccaagcccaaacctcaagcagaatctaagaagaagaaaaaggaaggcaagaaacaggagaagatgctggattaaaagatgtcacctgtggaacataaaaaggacatcagcaaacaggatcagttaaactattgcatttatatgtaccgtaggctttgtattcaaaattatctatagctaantacccatnaagcaaaancaaaagaaaagaaantttttgtagtancgtttttaaatgtatactntagtacccgtagggcttataanaagnactgtaatctttttagganttgantttagtnntgaaaatganaacattngaggtagttttttnaattatgggacatttncattaattttttncttttttggcnccatttaatgtntgacttgtnaactcttcntngtagnantttttncccaaatttttccnttgnaaaaatttntannaatnccnnaacnntcccttttnaaaatttttttncccaaantttnaagnccccaaggggggg

SEQ ID NO: 203 - DNA, 1149 bp, Homo sapiens
  misc_feature (815)..(815): n is a, c, g, or t
  misc_feature (824)..(824): n is a, c, g, or t
  misc_feature (855)..(855): n is a, c, g, or t
  misc_feature (858)..(858): n is a, c, g, or t
  misc_feature (877)..(877): n is a, c, g, or t
  misc_feature (879)..(879): n is a, c, g, or t
  misc_feature (912)..(912): n is a, c, g, or t
  misc_feature (918)..(918): n is a, c, g, or t
  misc_feature (950)..(950): n is a, c, g, or t
  misc_feature (957)..(957): n is a, c, g, or t
  misc_feature (971)..(971): n is a, c, g, or t
  misc_feature (976)..(976): n is a, c, g, or t
  misc_feature (981)..(981): n is a, c, g, or t
  misc_feature (986)..(986): n is a, c, g, or t
  misc_feature (989)..(989): n is a, c, g, or t
  misc_feature (995)..(995): n is a, c, g, or t
  misc_feature (1023)..(1023): n is a, c, g, or t
  misc_feature (1027)..(1028): n is a, c, g, or t
  misc_feature (1036)..(1036): n is a, c, g, or t
  misc_feature (1048)..(1048): n is a, c, g, or t
  misc_feature (1061)..(1061): n is a, c, g, or t
  misc_feature (1068)..(1069): n is a, c, g, or t
  misc_feature (1072)..(1072): n is a, c, g, or t
  misc_feature (1077)..(1077): n is a, c, g, or t
  misc_feature (1080)..(1080): n is a, c, g, or t
  misc_feature (1086)..(1086): n is a, c, g, or t
  misc_feature (1091)..(1091): n is a, c, g, or t
  misc_feature (1095)..(1095): n is a, c, g, or t
  misc_feature (1099)..(1099): n is a, c, g, or t
  misc_feature (1104)..(1104): n is a, c, g, or t
  misc_feature (1109)..(1109): n is a, c, g, or t
  misc_feature (1112)..(1112): n is a, c, g, or t
  misc_feature (1121)..(1121): n is a, c, g, or t
  misc_feature (1124)..(1124): n is a, c, g, or t
  misc_feature (1127)..(1127): n is a, c, g, or t
  misc_feature (1145)..(1145): n is a, c, g, or t
gcaacgcaccggggtcctgtcaccgccaccgccaaaaaagtcaccgccgctagggtcgccgttgcatcggtgcagggcaagatggcatccgccacagactcgcgctatgggcagaaggagtcctcggatcagaacttcgactacatgttcaagattctcatcatcggcaacagcagcgtgggcaagacgtccttcctcttccgctatgctgacgactcgttcacgcctgccttcgtcagcaccgtgggcatcgacttcaaggtcaagaccatctatcgcaacgacaagaggatcaagctgcagatctgggacacagcagggcaagagcggtaccggaccatcaccaccgcatactaccggggcgctatgggcttcatcctcatgtatgacatcaccaacgaggaatccttcaatgcagtgcaggactggtccacccagatcaagacctactcatgggacaatgcccaggtgctgctggtaggaaacaagtgtgacatggaggatgagcgggtggtgtcatcagaacgtggccggcagctagctgaccaccttgggttcgagttctttgaggcaagcgccaaggacaacattaacgtcaagcagacctttgagcgcctggtggatgtcatctgcgagaagatgtccgagtcgttggacacggcggaccctgcggtcacaggcgccaagcagggcccacagctcagtgaccagcaggtgccaccgcaccaggactgcgcctgctgagagccatcccactccctttcccctcttccctgtcttccccaccttccccaactacccgggcctgacccggnccctaccanccacgggcacaaaaccctgctcctgacttanccngtcaccttatttatattgnanctatttatttattattgaaatgtccccaggggnccaggntccctggccgcccaagcctggccctctgtaanatagccnttccccctcactgngggtncgggncccgngantcacgntaccttctgaaccccccccgcttttttnaatnncccctccnattttcatttgnaaagggccaaaanccctaannagnttatnggnagggangggcnggcngccnccctngtttnccngggggcaanccnttngggtttcttgggaaaggnaaaa

SEQ ID NO: 204 - DNA, 829 bp, Homo sapiens
  misc_feature (630)..(630): n is a, c, g, or t
  misc_feature (673)..(673): n is a, c, g, or t
  misc_feature (704)..(704): n is a, c, g, or t
  misc_feature (731)..(731): n is a, c, g, or t
  misc_feature (739)..(739): n is a, c, g, or t
  misc_feature (742)..(742): n is a, c, g, or t
  misc_feature (744)..(744): n is a, c, g, or t
  misc_feature (766)..(766): n is a, c, g, or t
  misc_feature (790)..(790): n is a, c, g, or t
  misc_feature (796)..(796): n is a, c, g, or t
  misc_feature (820)..(820): n is a, c, g, or t
  misc_feature (827)..(827): n is a, c, g, or t
  misc_feature (829)..(829): n is a, c, g, or t
gcagctttgggtggtggccgctgccgggcatcggcttccagtccgcggagggcgaggcggcgtggacagcggccccggcacccagcgccccgccgcccgcaagccgcgcgcccgtccgccgcgccccgagcccgccgcttcctatctcagcgccctgccgccgccgccgcggcccagcgagcggccctgatgcaggccatcaagtgtgtggtggtgggagacggagctgtaggtaaaacttgcctactgatcagttacacaaccaatgcatttcctggagaatatatccctactgtctttgacaattattctgccaatgttatggtagatggaaaaccggtgaatctgggcttatgggatacagctggacaagaagattatgacagattacgccccctatcctatccgcaaacagatgtgttcttaatttgcttttcccttgtgagtcctgcatcatttgaaaatgtccgtgcaaagtggtatcctgaggtgcggcaccactgtcccaacactcccatcatcctagtgggaactaaacttgatcttagggatgataaagacacgatcgagaaactgaaggagaagaagctgactcccatcacctatccgcagggtctagccatggctaangagattggtgctgtaaaatacctggagtgctcggcgctcacanagcgaggcctcaagacagtgtttgaacaaancgatccgagcagtcctctgcccgcctnccgtgaanaanangaaaagaaaatgcctgctgtgnaaaatgtctcaacccctcgtttcntggtcntgtccctttgaaacctttgtacgnttttgcntn

SEQ ID NO: 205 - DNA, 1038 bp, Homo sapiens
  misc_feature (812)..(812): n is a, c, g, or t
  misc_feature (833)..(833): n is a, c, g, or t
  misc_feature (859)..(859): n is a, c, g, or t
  misc_feature (875)..(875): n is a, c, g, or t
  misc_feature (878)..(878): n is a, c, g, or t
  misc_feature (884)..(884): n is a, c, g, or t
  misc_feature (908)..(908): n is a, c, g, or t
  misc_feature (920)..(920): n is a, c, g, or t
  misc_feature (923)..(923): n is a, c, g, or t
  misc_feature (927)..(927): n is a, c, g, or t
  misc_feature (929)..(930): n is a, c, g, or t
  misc_feature (938)..(938): n is a, c, g, or t
  misc_feature (941)..(941): n is a, c, g, or t
  misc_feature (944)..(944): n is a, c, g, or t
  misc_feature (954)..(954): n is a, c, g, or t
  misc_feature (976)..(976): n is a, c, g, or t
  misc_feature (979)..(979): n is a, c, g, or t
  misc_feature (986)..(986): n is a, c, g, or t
  misc_feature (988)..(988): n is a, c, g, or t
  misc_feature (991)..(991): n is a, c, g, or t
  misc_feature (996)..(996): n is a, c, g, or t
  misc_feature (1002)..(1002): n is a, c, g, or t
  misc_feature (1011)..(1012): n is a, c, g, or t
  misc_feature (1022)..(1022): n is a, c, g, or t
gcccacgcgtccgatgatggcaaactcacagatccttctaagacaagcaacactatccgtgttttcttgccgaacaagcaaagaacagtggtcaatgtgcgaaatggaatgagcttgcatgactgccttatgaaagcactcaaggtgaggggcctgcaaccagagtgctgtgcagtgttcagacttctccacgaacacaaaggtaaaaaagcacgcttagattggaatactgatgctgcgtctttgattggagaagaacttcaagtagatttcctggatcatgttcccctcacaacacacaactttgctcggaagacgttcctgaagcttgccttctgtgacatctgtcagaaattcctgctcaatggatttcgatgtcagacttgtggctacaaatttcatgagcactgtagcaccaaagtacctactatgtgtgtggactggagtaacatcagacaactcttattgtttccaaattccactattggtgatagtggagtcccagcactaccttctttgactatgcgtcgtatgcgagagtctgtttccaggatgcctgttagttctcagcacagatattctacacctcacgccttcacctttaacacctccagtccctcatctgaaggttccctctcccagaggcagaggtcgacatccacacctaatgtccacatggtcagcaccaccctgcctgtggacagcaggatgattgaggatgcaattcgaagtcacagcgaatcagcctcaccttcagcccctgtccagtagccccaacaatctgagcccaacaggctggtcacagccgaaancccccgtgccagcacaaaaanagcggggcaccagtatctggggaccnaggaaaaaaaaaaatnagncctcgnggacagaaaaatccagctattatngggaaaaaaaanccngtgnanngatgctgnccnccngattgggccngctcttttggaactgtttaaanggnaaatggncnggnaaatnttgccntaaaaatcnnaaggtttccnacccaccccaaaaaat

SEQ ID NO: 206 - DNA, 1046 bp, Homo sapiens
  misc_feature (832)..(832): n is a, c, g, or t
  misc_feature (839)..(839): n is a, c, g, or t
  misc_feature (843)..(843): n is a, c, g, or t
  misc_feature (848)..(848): n is a, c, g, or t
  misc_feature (851)..(851): n is a, c, g, or t
  misc_feature (915)..(915): n is a, c, g, or t
  misc_feature (928)..(928): n is a, c, g, or t
  misc_feature (931)..(931): n is a, c, g, or t
  misc_feature (934)..(934): n is a, c, g, or t
  misc_feature (937)..(937): n is a, c, g, or t
  misc_feature (954)..(954): n is a, c, g, or t
  misc_feature (968)..(968): n is a, c, g, or t
  misc_feature (978)..(978): n is a, c, g, or t
  misc_feature (989)..(989): n is a, c, g, or t
  misc_feature (992)..(992): n is a, c, g, or t
  misc_feature (994)..(994): n is a, c, g, or t
  misc_feature (999)..(999): n is a, c, g, or t
  misc_feature (1001)..(1001): n is a, c, g, or t
  misc_feature (1004)..(1004): n is a, c, g, or t
  misc_feature (1006)..(1006): n is a, c, g, or t
  misc_feature (1014)..(1014): n is a, c, g, or t
  misc_feature (1017)..(1017): n is a, c, g, or t
  misc_feature (1043)..(1043): n is a, c, g, or t
  misc_feature (1045)..(1046): n is a, c, g, or t
gctcagtcggacgggcgcggagacgcttctggaaggaacgccgcgatggctgcgcagggagagccccaggtccagttcaaacttgtattggttggtgatggtggtactggaaaaacgaccttcgtgaaacgtcatttgactggtgaatttgagaagaagtatgtagccaccttgggtgttgaggttcatcccctagtgttccacaccaacagaggacctattaagttcaatgtatgggacacagccggccaggagaaattcggtggactgagagatggctattatatccaagcccagtgtgccatcataatgtttgatgtaacatcgagagttacttacaagaatgtgcctaactggcatagagatctggtacgagtgtgtgaaaacatccccattgtgttgtgtggcaacaaagtggatattaaggacaggaaagtgaaggcgaaatccattgtcttccaccgaaagaagaatcttcagtactacgacatttctgccaaaagtaactacaactttgaaaagcccttcctctggcttgctaggaagctcattggagaccctaacttggaatttgttgccatgcctgctctcgccccaccagaagttgtcatggacccagctttggcagcacagtatgagcacgacttagaggttgctcagacaactgctctcccggatgaggatgatgacctgtgagaatgaagctggagcccagcgtcagaagtctagttttataggcagctgtcctgtgatgtcagcggtgcagcgtgtgtgccacctcattattatctagctaagcggaacatgtgcttcatctgtgggatgctgaagnaaatgantggncttcngantgaatgtggcagtttaaaaaataacttcattgtttggacctgcatatttagctgttttggaacncagttgattcctnganttncanaataaaactgctgcagnccatcccaaaatcnggggggaaanctgttggtacngcntnccatncnttncnttaaaacnaanaagttgttttcaattccaaaaaaaanann

SEQ ID NO: 207 - DNA, 1146 bp, Homo sapiens
  misc_feature (805)..(805): n is a, c, g, or t
  misc_feature (810)..(810): n is a, c, g, or t
  misc_feature (837)..(837): n is a, c, g, or t
  misc_feature (864)..(864): n is a, c, g, or t
  misc_feature (873)..(873): n is a, c, g, or t
  misc_feature (875)..(875): n is a, c, g, or t
  misc_feature (883)..(883): n is a, c, g, or t
  misc_feature (888)..(888): n is a, c, g, or t
  misc_feature (896)..(896): n is a, c, g, or t
  misc_feature (918)..(918): n is a, c, g, or t
  misc_feature (920)..(920): n is a, c, g, or t
  misc_feature (934)..(934): n is a, c, g, or t
  misc_feature (955)..(955): n is a, c, g, or t
  misc_feature (963)..(963): n is a, c, g, or t
  misc_feature (966)..(966): n is a, c, g, or t
  misc_feature (968)..(968): n is a, c, g, or t
  misc_feature (977)..(977): n is a, c, g, or t
  misc_feature (980)..(980): n is a, c, g, or t
  misc_feature (985)..(985): n is a, c, g, or t
  misc_feature (987)..(987): n is a, c, g, or t
  misc_feature (1005)..(1005): n is a, c, g, or t
  misc_feature (1007)..(1007): n is a, c, g, or t
  misc_feature (1011)..(1011): n is a, c, g, or t
  misc_feature (1014)..(1014): n is a, c, g, or t
  misc_feature (1019)..(1019): n is a, c, g, or t
  misc_feature (1021)..(1021): n is a, c, g, or t
  misc_feature (1037)..(1037): n is a, c, g, or t
  misc_feature (1039)..(1039): n is a, c, g, or t
  misc_feature (1044)..(1044): n is a, c, g, or t
  misc_feature (1049)..(1049): n is a, c, g, or t
  misc_feature (1057)..(1057): n is a, c, g, or t
  misc_feature (1060)..(1060): n is a, c, g, or t
  misc_feature (1067)..(1067): n is a, c, g, or t
  misc_feature (1070)..(1070): n is a, c, g, or t
  misc_feature (1074)..(1074): n is a, c, g, or t
  misc_feature (1077)..(1078): n is a, c, g, or t
  misc_feature (1084)..(1084): n is a, c, g, or t
  misc_feature (1087)..(1087): n is a, c, g, or t
  misc_feature (1094)..(1094): n is a, c, g, or t
  misc_feature (1107)..(1107): n is a, c, g, or t
  misc_feature (1123)..(1123): n is a, c, g, or t
  misc_feature (1128)..(1128): n is a, c, g, or t
  misc_feature (1141)..(1141): n is a, c, g, or t
gcccacgcgtccgagcgtccgcgccgcgaggaggaggccctgctggtttctgtgcgggctcttgtcaggatggtgaagctgttcatcggaaacctgccccgggaggctacagagcaggagattcgctcactcttcgagcagtatgggaaggtgctggaatgtgacatcattaagaattacggctttgtgcacatagaagacaagacggcagctgaggatgccatacgcaacctgcaccattacaagcttcatggggtgaacatcaacgtggaagccagcaagaataagagcaaaacctcaacaaagttgcatgtgggcaacatcagtcccacctgcaccaataaggagcttcgagccaagtttgaggagtatggtccggtcatcgaatgtgacatcgtgaaagattatgccttcgtacacatggagcgggcagaggatgcagtggaggccatcaggggccttgataacacagagtttcaaggcaaacgaatgcacgtgcagttgtccaccagccggcttaggactgcgcccgggatgggagaccagagcggctgctatcggtgcgggaaagaggggcactggtccaaagagtgtccgatagatcgttcaggccgcgtggcagacttgaccgagcaatataatgagcaatacggagcagtgcgtacgccttacaccatgagctatggggattcattgtattacaacaacgcgtacggagcgctcgatgcctactacaagcgctgccgtgctgcccggtcctatgaagcagtggcagctgcagctgcctccgtgtataattacgcanaacanaacctgtcccagctgccacaagtccanaatacagccatggccagtcacctcacntccactctntngatcctangaaanaaacctgntgccacctcaggactgctgccnanctgctgctgcacancacccctgctgctgttactgnaacttccnttnanattacgggnggnatcgnanccccttgggtcgcgctanancccnatncccantnttgggaaaggctacgntnccggncatgnaaaatganttntccaagnttnaaanccnngggaanttncttttanaaaatggcccggnttaaacggaaaaaatnccatngggccggaaaccnccttt

SEQ ID NO: 208 - DNA, 829 bp, Homo sapiens
ggcggagcatcgcagccggcccgggcccccgccagcctccctcctcgcgtccctcggtgtcctccgcgggccggcgcgatgcggctgggcccgaggaccgcggcgttggggctgctgctgctgtgcgccgccgcggccggcgccggcaaggccgaggagctgcactacccgctgggcgagcgccgcagcgactacgaccgcgaggcgctgctgggcgtccaggaagatgtggatgaatatgttaaactcggccacgaagagcagcaaaaaagactgcaggcgatcataaagaaaatcgacttggactcagatggctttctcactgaaagtgaactcagttcatggattcagatgtcttttaagcattatgctatgcaagaagcaaaacaacagtttgttgaatatgataaaaacagtgatgatactgtgacttgggatgaatataacattcagatgtatgatcgtgtgattgactttgatgagaacactgctctggatgatgcagaagaggagtcctttaggaagcttcacttaaaggacaagaagcgatttgaaaaagctaaccaggattcaggtcccggtttgagtcttgaagaatttattgcttttgagcatcctgaagaagttgattatatgacggaatttgtcattcaagaagctttagaagaacatgacaaaaatggtgatggatttgttagtttggaagaatttcttggtgattacaggtgggatccaactgcaaatgaagatccagaatggatacttgttgagaaagacagattcgtgaatgattatgacaaagataacgatggcaggcttgatccccaag

SEQ ID NO: 209 - DNA, 1140 bp, Homo sapiens
  misc_feature (810)..(810): n is a, c, g, or t
  misc_feature (874)..(874): n is a, c, g, or t
  misc_feature (877)..(879): n is a, c, g, or t
  misc_feature (901)..(901): n is a, c, g, or t
  misc_feature (928)..(928): n is a, c, g, or t
  misc_feature (933)..(934): n is a, c, g, or t
  misc_feature (956)..(956): n is a, c, g, or t
  misc_feature (961)..(961): n is a, c, g, or t
  misc_feature (970)..(970): n is a, c, g, or t
  misc_feature (981)..(981): n is a, c, g, or t
  misc_feature (984)..(984): n is a, c, g, or t
  misc_feature (989)..(989): n is a, c, g, or t
  misc_feature (1005)..(1005): n is a, c, g, or t
  misc_feature (1024)..(1024): n is a, c, g, or t
  misc_feature (1048)..(1048): n is a, c, g, or t
  misc_feature (1050)..(1050): n is a, c, g, or t
  misc_feature (1052)..(1052): n is a, c, g, or t
  misc_feature (1054)..(1054): n is a, c, g, or t
  misc_feature (1057)..(1057): n is a, c, g, or t
  misc_feature (1060)..(1062): n is a, c, g, or t
  misc_feature (1073)..(1073): n is a, c, g, or t
  misc_feature (1077)..(1077): n is a, c, g, or t
  misc_feature (1081)..(1081): n is a, c, g, or t
  misc_feature (1094)..(1094): n is a, c, g, or t
  misc_feature (1098)..(1098): n is a, c, g, or t
  misc_feature (1109)..(1109): n is a, c, g, or t
  misc_feature (1113)..(1113): n is a, c, g, or t
  misc_feature (1115)..(1115): n is a, c, g, or t
  misc_feature (1132)..(1132): n is a, c, g, or t
  misc_feature (1135)..(1135): n is a, c, g, or t
  misc_feature (1140)..(1140): n is a, c, g, or t
gcccagagcaattgttacatctggatggaaaagcgacaccggggtccaggattggcctccggacagctgtactcctaccctgcccggcgctggcggaaaaagcggcgagcccatccccctgaggatccacgactttccttcccatctattaagccagacacagaccagaccctgaagaaggaggggctgatctctcaggatggcagtagtttagaggctctgttgcgcactgaccccctggagaagcgaggtgccccggatccccgagttgatgatgacagcctgggcgagtttcctgtgaccaacagtcgagcgcgaaagcggatcctagaaccagatgacttcctggatgacctcgatgatgaagactatgaagaagatactcccaagcgtcggggaaaggggaaatccaagggtaagggtgtgggcagtgcccgtaagaagctggatgcttccatcctggaggaccgggataagccctatgcctgtgacatttgtggaaaacgttacaagaaccgaccaggcctcagttaccactatgcccactcccacttggctgaggaggagggcgaggacaaggaagactctcaaccacccactcctgtttcccagaggtctgaggagcagaaatccaaaaagggtcctgatggattggccttgcccaacaactactgtgacttctgcctgggggactcaaagattaacaagaagacgggacaacccgaggagctggtgtcctgttctgactgtggccgctcagggcatccatcttgcctccaatttacccccgtgatgatggcggcagtgaanacataccgctggcagtgcatcgagtgcaaatgttgcaatatctgcggcacctccgaaaatgacnacnnnttgctcttctgtgatgactgcnatcgtggctaccacatgtactgtctcnccccnntccatgtctgaccccctgaagnaattngaactgccncctgtgtttgnacntgttnaaaaaaaaacttcctntaccaaaaccaaactcctnttgaatgggccccccctgctcccnanantntanggnnnttttccccccnttanattnaaaccattttccntttnccccccccttnaaancnaaaaacttgggggtttnccncttcn

SEQ ID NO: 210 - DNA, 749 bp, Homo sapiens
gacatttttgcccaaaaatgtctattcttgacggagagtctaaagcagttcacaggtaatgtgaggagaggtgtcatgaggggaaatggatttatactgagtatctgcatattgcctgatgaagaggataattttccagccagatagtgggatgcagactgaatattttcttgttttcttttcttagaaaaaatgcagtcagatatggagaaaatccaagaattaagagaggctcagttatactcagtggacgtgactctggacccagacacggcctaccccagcctgatcctctctgataatctgcggcaagtgcggtacagttacctccaacaggacctgcctgacaaccccgagaggttcaatctgtttccctgtgtcttgggctctccatgcttcatcgccgggagacattattgggaggtagaggtgggagataaagccaagtggaccataggtgtctgtgaagactcagtgtgcagaaaaggtggagtaacctcagccccccagaatggattctgggcagtgtctttgtggtatgggaaagaatattgggctcttacctccccaatgactgccctacccctgcggaccccgctccagcgggtggggattttcttggactatgatgctggtgaggtctccttctacaacgtgacagagaggtgtcacaccttcactttctctcatgctaccttttgtgggcctgtccggccctacttcagtctgagttactcgggagggaaaag

SEQ ID NO: 211 - DNA, 857 bp, Homo sapiens
  misc_feature (800)..(800): n is a, c, g, or t
  misc_feature (832)..(835): n is a, c, g, or t
  misc_feature (838)..(838): n is a, c, g, or t
  misc_feature (841)..(844): n is a, c, g, or t
  misc_feature (846)..(857): n is a, c, g, or t
gaaccgcagttgactagcacctgctaccgcgcctttgcttcctggcgcacgcggagcctcctggagcctgccaccatcctgcctactacgtgctgccctgcgcccgcagccatgtgccgcaccctggccgccttccccaccacctgcctggagagagccaaagagttcaagacacgtctggggatctttcttcacaaatcagagctgggctgcgatactgggagtactggcaagttcgagtggggcagtaaacacagcaaagagaatagaaacttctcagaagatgtgctggggtggagagagtcgttcgacctgctgctgagcagtaaaaatggagtggctgccttccacgctttcctgaagacagagttcagtgaggagaacctggagttctggctggcctgtgaggagttcaagaagatccgatcagctaccaagctggcctccagggcacaccagatctttgaggagttcatttgcagtgaggcccctaaagaggtcaacattgaccatgagacccgcgagctgacgaggatgaacctgcagactgccacagccacatgctttgatgcggctcaggggaagacacgtaccctgatggagaaggactcctacccacgcttcctgaagtcgcctgcttaccgggacctggctgcccaagcctcagccgcctctgccactctgtccagctgcagcctggacgagccctcacacacctgagtctccacggcagtgaggaagccagccgggaaagaaaggttgagtcacccatccccgaggtggctgcccctgtgtgggangcaggttctgcaaagcaagtgccagaggaccnnnnaanaannnnannnnnnnnnnnn

SEQ ID NO: 212 - DNA, 1284 bp, Homo sapiens
  misc_feature (758)..(758): n is a, c, g, or t
  misc_feature (847)..(847): n is a, c, g, or t
  misc_feature (861)..(861): n is a, c, g, or t
  misc_feature (866)..(866): n is a, c, g, or t
  misc_feature (871)..(871): n is a, c, g, or t
  misc_feature (883)..(884): n is a, c, g, or t
  misc_feature (891)..(891): n is a, c, g, or t
  misc_feature (919)..(919): n is a, c, g, or t
  misc_feature (933)..(933): n is a, c, g, or t
  misc_feature (940)..(940): n is a, c, g, or t
  misc_feature (950)..(950): n is a, c, g, or t
  misc_feature (956)..(956): n is a, c, g, or t
  misc_feature (960)..(960): n is a, c, g, or t
  misc_feature (964)..(964): n is a, c, g, or t
  misc_feature (970)..(970): n is a, c, g, or t
  misc_feature (977)..(977): n is a, c, g, or t
  misc_feature (981)..(981): n is a, c, g, or t
  misc_feature (988)..(988): n is a, c, g, or t
  misc_feature (991)..(991): n is a, c, g, or t
  misc_feature (996)..(996): n is a, c, g, or t
  misc_feature (998)..(998): n is a, c, g, or t
  misc_feature (1008)..(1008): n is a, c, g, or t
  misc_feature (1018)..(1018): n is a, c, g, or t
  misc_feature (1023)..(1024): n is a, c, g, or t
  misc_feature (1028)..(1028): n is a, c, g, or t
  misc_feature (1049)..(1049): n is a, c, g, or t
  misc_feature (1054)..(1054): n is a, c, g, or t
  misc_feature (1059)..(1059): n is a, c, g, or t
  misc_feature (1072)..(1072): n is a, c, g, or t
  misc_feature (1076)..(1076): n is a, c, g, or t
  misc_feature (1082)..(1082): n is a, c, g, or t
  misc_feature (1095)..(1095): n is a, c, g, or t
  misc_feature (1101)..(1101): n is a, c, g, or t
  misc_feature (1106)..(1106): n is a, c, g, or t
  misc_feature (1130)..(1130): n is a, c, g, or t
  misc_feature (1132)..(1132): n is a, c, g, or t
  misc_feature (1146)..(1146): n is a, c, g, or t
  misc_feature (1149)..(1149): n is a, c, g, or t
  misc_feature (1157)..(1157): n is a, c, g, or t
  misc_feature (1159)..(1159): n is a, c, g, or t
  misc_feature (1162)..(1162): n is a, c, g, or t
  misc_feature (1170)..(1170): n is a, c, g, or t
  misc_feature (1182)..(1182): n is a, c, g, or t
  misc_feature (1187)..(1187): n is a, c, g, or t
  misc_feature (1198)..(1198): n is a, c, g, or t
  misc_feature (1200)..(1200): n is a, c, g, or t
  misc_feature (1210)..(1210): n is a, c, g, or t
  misc_feature (1226)..(1228): n is a, c, g, or t
  misc_feature (1232)..(1232): n is a, c, g, or t
  misc_feature (1236)..(1236): n is a, c, g, or t
  misc_feature (1251)..(1251): n is a, c, g, or t
  misc_feature (1257)..(1257): n is a, c, g, or t
  misc_feature (1267)..(1267): n is a, c, g, or t
  misc_feature (1276)..(1277): n is a, c, g, or t
  misc_feature (1281)..(1281): n is a, c, g, or t
  misc_feature (1284)..(1284): n is a, c, g, or t
gcggacgcgtggggatttgatggcgtgatgtctcacagaaagttctccgctcccagacatgggtccctcggcttcctgcctcggaagcgcagcagcaggcatcgtgggaaggtgaagagcttccctaaggatgacccgtccaagccggtccacctcacagccttcctgggatacaaggctggcatgactcacatcgtgcgggaagtcgacaggccgggatccaaggtgaacaagaaggaggtggtggaggctgtgaccattgtagagacaccacccatggtggttgtgggcattgtgggctacgtggaaacccctcgaggcctccggaccttcaagactgtctttgctgagcacatcagtgatgaatgcaagaggcgtttctataagaattggcataaatctaagaagaaggcctttaccaagtactgcaagaaatggcaggatgaggatggcaagaagcagctggagaaggacttcagcagcatgaagaagtactgccaagtcatccgtgtcattgcccacacccagatgcgcctgcttcctctgcgccagaagaaggcccacctgatggagatccaggtgaacggaggcactgtggccgagaagctggactgggcccgcgagaggcttgagcagcaggtacctgtgaaccaagtgtttgggcaggatgagatgatcgacgtcatcggggtgaccaagggcaaaggctacaaaggggtcaccagtcgttggcacaccaagaagctgccccgcaaganccaccgaggcctgcgcaaggtggcctgtattggggcatggcatcctgctcgtgtagcctttctctgtggcacgcgctgggcaaaaaggnctaccatcaccgcnctganatcancaagaaaaattnntaagatnggccagggctaccttatcaaggacggcnagctgaatcaaaanaatgccncccctgactntgaacntatntganaaaganccatcancccnctggggnggnctttntncccctatggngaagtgaccnatganntttntccttgcttaaaaggcttttntgggnggaanccaaaaaacgggngccncccccnccccaagtgcttnttgggncaaanaaaacggcgggcctctgaaaaaantnacctttaatttttngancccccccnanttnggcctggncccttcccaacnggggngaaaaaaaccntnttgggacccncgaaaaaaaccaattnnnaagnaaangatcttagcccaaanaatttncttggggggncccaaaaanntttnccn

SEQ ID NO: 213 - DNA, 969 bp, Homo sapiens
  misc_feature (756)..(756): n is a, c, g, or t
  misc_feature (850)..(850): n is a, c, g, or t
  misc_feature (877)..(877): n is a, c, g, or t
  misc_feature (900)..(900): n is a, c, g, or t
  misc_feature (911)..(911): n is a, c, g, or t
  misc_feature (932)..(932): n is a, c, g, or t
  misc_feature (937)..(937): n is a, c, g, or t
  misc_feature (939)..(939): n is a, c, g, or t
  misc_feature (946)..(946): n is a, c, g, or t
  misc_feature (950)..(969): n is a, c, g, or t
ggtcatcgtattgaggaagttcctgaacttcctttggtagttgaagataaagttgaaggctacaagaagaccaaggaagctgttttgctccttaagaaacttaaagcctggaatgatatcaaaaaggtctatgcctctcagcgaatgagagctggcaaaggcaaaatgagaaaccgtcgccgtatccagcgcaggggcccgtgcatcatctataatgaggataatggtatcatcaaggccttcagaaacatccctggaattactctgcttaatgtaagcaagctgaacattttgaagcttgctcctggtgggcatgtgggacgtttctgcatttggactgaaagtgctttccggaagttagatgaattgtacggcacttggcgtaaagccgcttccctcaagagtaactacaatcttcccatgcacaagatgattaatacagatcttagcagaatcttgaaaagcccagagatccaaagagcccttcgagcaccacgcaagaagatccatcgcagagtcctaaagaagaacccactgaaaaacttgagaatcatgttgaagctaaacccatatgcaaagaccatgcgccggaacaccattcttcgccaggccaggaatcacaagctccgggtggataaggcagctgctgcagcagcggcactacaagccaaatcagatgagaaggcggcggttgcaggcaagaagcctgtggtaggtaagaaaggaaagaaggctgctgttggtgttaagaagcanaagaagcctctggtgggaaaaaaggcagcagctaccaagaaaccagcccctgaaaagaagcctgcagagaaaaacctactacagaggagaaaancctgctgcataaactcttaatttgatnattccataaaggtcaatcatttnggacagcttcntttgaaaaagacctgattaancggcngngaaaacntggnnnnnnnnnnnnnnnnnnnn

SEQ ID NO: 214 - DNA, 1014 bp, Homo sapiens
  misc_feature (800)..(800): n is a, c, g, or t
  misc_feature (814)..(814): n is a, c, g, or t
  misc_feature (826)..(826): n is a, c, g, or t
  misc_feature (863)..(863): n is a, c, g, or t
  misc_feature (873)..(873): n is a, c, g, or t
  misc_feature (880)..(880): n is a, c, g, or t
  misc_feature (883)..(883): n is a, c, g, or t
  misc_feature (907)..(907): n is a, c, g, or t
  misc_feature (931)..(931): n is a, c, g, or t
  misc_feature (949)..(949): n is a, c, g, or t
  misc_feature (965)..(965): n is a, c, g, or t
  misc_feature (967)..(967): n is a, c, g, or t
  misc_feature (990)..(990): n is a, c, g, or t
  misc_feature (992)..(1014): n is a, c, g, or t
gcgagcagcggacgccggtctctgttccgcaggatggggtttgttaaagttgttaagaataaggcctactttaagagataccaagtgaaatttagaagacgacgagagggtaaaactgattattatgctcggaaacgcttggtgatacaagataaaaataaatacaacacacccaaatacaggatgatagttcgtgtgacaaacagagatatcatttgtcagattgcttatgcccgtatagagggggatatgatagtctgcgcagcgtatgcacacgaactgccaaaatatggtgtgaaggttggcctgacaaattatgctgcagcatattgtactggcctgctgctggcccgcaggcttctcaataggtttggcatggacaagatctatgaaggccaagtggaggtgactggtgatgaatacaatgtggaaagcattgatggtcagccaggtgccttcacctgctatttggatgcaggccttgccagaactaccactggcaataaagtttttggtgccctgaagggagctgtggatggaggcttgtctatccctcacagtaccaaacgattccctggttatgattctgaaagcaaggaatttaatgcagaagtacatcggaagcacatcatgggccagaatgttgcagattacatgcgctacttaatggaagaagatgaagatgcttacaagaaacagttctctcaatacataaagaacagcgtaactccagacatgatggaggagatgtataagaaagctcatgctgctatacgagagaatccagtctatgaaaaganccccaagaaagaantaaaaagaagangtggaaccgtcccaaaatgtccccttgctcaaaaaangatcgggtanctcaaanaangcaagcttcctcaaagctcaggancgggctgctgaaagctaacccacnattttctatgatttttcnaaaatagataataacntntgaccccccctaaaaaaaaaaanannnnnnnnnnnnnnnnnnnnnnn

SEQ ID NO: 215 - DNA, 923 bp, Homo sapiens
  misc_feature (673)..(673): n is a, c, g, or t
  misc_feature (696)..(696): n is a, c, g, or t
  misc_feature (712)..(712): n is a, c, g, or t
  misc_feature (770)..(770): n is a, c, g, or t
  misc_feature (785)..(785): n is a, c, g, or t
  misc_feature (803)..(803): n is a, c, g, or t
  misc_feature (815)..(815): n is a, c, g, or t
  misc_feature (841)..(841): n is a, c, g, or t
  misc_feature (854)..(855): n is a, c, g, or t
  misc_feature (858)..(858): n is a, c, g, or t
  misc_feature (893)..(893): n is a, c, g, or t
  misc_feature (900)..(900): n is a, c, g, or t
  misc_feature (902)..(902): n is a, c, g, or t
  misc_feature (916)..(916): n is a, c, g, or t
gcccacgcgtccggcaagatggcgggtgaaaaagttgagaagccagatactaaagagaagaaacccgaagccaagaaggttgatgctggtggcaaggtgaaaaagggtaacctcaaagctaaaaagcccaagaaggggaagccccattgcagccgcaaccctgtccttgtcagaggaattggcaggtattcccgatctgccatgtattccagaaaggccatgtacaagaggaagtactcagccgctaaatccaaggttgaaaagaaaaagaaggagaaggttctcgcaactgttacaaaaccagttggtggtgacaagaacggcggtacccgggtggttaaacttcgcaaaatgcctagatattatcctactgaagatgtgcctcgaaagctgttgagccacggcaaaaaacccttcagtcagcacgtgagaaaactgcgagccagcattacccccgggaccattctgatcatcctcactggacgccacaggggcaagagggtggttttcctgaagcagctggctagtggcttattacttgtgactggacctctggtcctcaatcgagttcctctacgaagaacacaccagaaatttgtcattgccacttcaaccaaaaatcgatatcagcaatgtaaaaatcccaaaacatcttactgatgcttacttcagnaagaagaagctgcggaagcccanacaccaggaaggtganatcttcgacacagaaaaagagaaatatgagattacggaaccagcgcaagattgatcanaaagctgtggactcncaaatttttaccaaaatncaaagctattcntcagcctccagggctacctgcgattnggttttgctctgnnaanggaatttttcctcccaaatttggtgtttctaaatntcttaanancctatttaaatacntgactac

SEQ ID NO: 216 - DNA, 815 bp, Homo sapiens
  misc_feature (667)..(667): n is a, c, g, or t
  misc_feature (716)..(716): n is a, c, g, or t
  misc_feature (787)..(787): n is a, c, g, or t
  misc_feature (792)..(792): n is a, c, g, or t
  misc_feature (794)..(815): n is a, c, g, or t
gagaagaaggaggttcctgctgtgccagaaacccttaagaaaaagcgaaggaatttcgcagagctgaagatcaagcgcctgagaaagaagtttgcccaaaagatgcttcgaaaggcaaggaggaagcttatctatgaaaaagcaaagcactatcacaaggaatataggcagatgtacagaactgaaattcgaatggcgaggatggcaagaaaagctggcaacttctatgtacctgcagaacccaaattggcgtttgtcatcagaatcagaggtatcaatggagtgagcccaaaggttcgaaaggtgttgcagcttcttcgccttcgtcaaatcttcaatggaacctttgtgaagctcaacaaggcttcgattaacatgctgaggattgtagagccatatattgcatgggggtaccccaatctgaagtcagtaaatgaactaatctacaagcgtggttatggcaaaatcaataagaagcgaattgctttgacagataacgctttgattgctcgatctcttggtaaatacggcatcatctgcatggaggatttgattcatgagatctatactgttggaaaacgcttcaaagaggcaaataacttcctgtggcccttcaaattgtcttctccacgaggtggaatgaagaaaaagaccacccattttgtanaaggtggagatgctggcaacagggaggaccagatcaacaggcttattanaagaatgaactaaggtgtctaccatgattatttttctaagctggttggttaataaacagtacctgctctcnaattngnnnnnnnnnnnnnnnnnnnnnn

SEQ ID NO: 217 - DNA, 863 bp, Homo sapiens
gagatgccgaaaggaaagaaggccaagggaaagaaggtggctccggccccagctgtcgtgaagaagcaggaggctaagaaagtggtgaatcccctgtttgagaaaaggcctaagaattttggcattggacaggacatccagcccaaaagagacctcacccgctttgtgaaatggccccgctatatcaggttgcagcggcagagagccatcctctataagcggctgaaagtgcctcctgcgattaaccagttcacccaggccctggaccgccaaacagctactcagctgcttaagctggcccacaagtacagaccagagacaaagcaagagaagaagcagagactgttggcccgggccgagaagaaggctgctggcaaaggggacgtcccaacgaagagaccacctgtccttcgagcaggagttaacaccgtcaccaccttggtggagaacaagaaagctcagctggtggtgattgcacacgacgtggatcccatcgagctggttgtcttcttgcctgccctgtgtcgtaaaatgggggtcccttactgcattatcaagggaaaggcaagactgggacgtctagtccacaggaagacctgcaccactgtcgccttcacacaggtgaactcggaagacaaaggcgctttggctaagctggtggaagctatcaggaccaattacaatgacagatacgatgagatccgccgtcactggggtggcaatgtcctgggtcctaagtctgtggctcgtatcgccaagctcgaaaaggcaaaggctaaagaacttgccactaaactgggttaaatgtacactgttgagttttctgtacataaaaataattgaaataatacaaattttccttc

SEQ ID NO: 218 - DNA, 866 bp, Homo sapiens
  misc_feature (780)..(780): n is a, c, g, or t
  misc_feature (792)..(792): n is a, c, g, or t
  misc_feature (799)..(799): n is a, c, g, or t
  misc_feature (837)..(837): n is a, c, g, or t
  misc_feature (844)..(866): n is a, c, g, or t
ggaacaggacccgtcgccatgggccgtgtgatccgtggacagaggaagggcgccgggtctgtgttccgcgcgcacgtgaagcaccgtaaaggcgctgcgcgcctgcgcgccgtggatttcgctgagcggcacggctacatcaagggcatcgtcaaggacatcatccacgacccgggccgcggcgcgcccctcgccaaggtggtcttccgggatccgtatcggtttaagaagcggacggagctgttcattgccgccgagggcattcacacgggccagtttgtgtattgcggcaagaaggcccagctcaacattggcaatgtgctccctgtgggcaccatgcctgagggtacaatcgtgtgctgcctggaggagaagcctggagaccgtggcaagctggcccgggcatcagggaactatgccaccgttatctcccacaaccctgagaccaagaagacccgtgtgaagctgccctccggctccaagaaggttatctcctcagccaacagagctgtggttggtgtggtggctggaggtggccgaattgacaaacccatcttgaaggctggccgggcgtaccacaaatataaggcaaagaggaactgctggccacgagtacggggtgtggccatgaatcctgtggagcatccttttggaggtggcaaccaccagcacatcggcaagccctccaccatccgcagagatgcccctgctggccgcaaagtgggtctcattgctgcccgccggactggacgtctccggggaaccaagactgtgcagganaaagagaactantgctganggcctcaataaagtttgtgtttatgccaaaaaaaaaanaaaaaannnnnnnnnnnnnnnnnnnnnnn

SEQ ID NO: 219 - DNA, 901 bp, Homo sapiens
  misc_feature (677)..(677): n is a, c, g, or t
  misc_feature (710)..(711): n is a, c, g, or t
  misc_feature (713)..(714): n is a, c, g, or t
  misc_feature (717)..(717): n is a, c, g, or t
  misc_feature (725)..(725): n is a, c, g, or t
  misc_feature (727)..(727): n is a, c, g, or t
  misc_feature (729)..(730): n is a, c, g, or t
  misc_feature (732)..(732): n is a, c, g, or t
  misc_feature (734)..(735): n is a, c, g, or t
  misc_feature (737)..(738): n is a, c, g, or t
  misc_feature (740)..(740): n is a, c, g, or t
  misc_feature (742)..(742): n is a, c, g, or t
  misc_feature (756)..(756): n is a, c, g, or t
  misc_feature (759)..(759): n is a, c, g, or t
  misc_feature (770)..(770): n is a, c, g, or t
  misc_feature (772)..(772): n is a, c, g, or t
  misc_feature (800)..(800): n is a, c, g, or t
  misc_feature (802)..(802): n is a, c, g, or t
  misc_feature (810)..(810): n is a, c, g, or t
  misc_feature (813)..(813): n is a, c, g, or t
  misc_feature (832)..(832): n is a, c, g, or t
  misc_feature (866)..(866): n is a, c, g, or t
  misc_feature (869)..(869): n is a, c, g, or t
  misc_feature (893)..(893): n is a, c, g, or t
  misc_feature (897)..(897): n is a, c, g, or t
gcggacgcgtgggctgcgagaatgaagactattctcagcaatcagactgtcgacattccagaaaatgtcgacattactctgaagggacgcacagttatcgtgaagggccccagaggaaccctgcggagggacttcaatcacatcaatgtagaactcagccttcttggaaagaaaaaaaagaggctccgggttgacaaatggtggggtaacagaaaggaactggctaccgttcggactatttgtagtcatgtacagaacatgatcaagggtgttacactgggcttccgttacaagatgaggtctgtgtatgctcacttccccatcaacgttgttatccaggagaatgggtctcttgttgaaatccgaaatttcttgggtgaaaaatacatccgcagggttcggatgagaccaggtgttgcttgttcagtatctcaagcccagaaagatgaattaatccttgaaggaaatgacattgagcttgtttcaaattcagcggctttgattcagcaagccacaacagttaaaaacaaggatatcaggaaatttttggatggtatctatgtctctgaaaaaggaactgttcagcaggctgatgaataagatctaagagttacctggctacagaaagaagatgccagatgacacttaagacctacttgtgatatttaaatgatgcnaataaaagacctattgattttggaaaaaaaaannannaancaaaaaancnanncncnnannantnaaaaaaaagggcgnccncctccctatangngagtcgtattaaaccttaattagctgancnttggaacnccngttgataaatcccgtaaangacccccaaactccatcctggatttgttcaaaanccncggttgccccccgggcgttttttnttgnggaa

SEQ ID NO: 220 - DNA, 1067 bp, Homo sapiens
  misc_feature (777)..(777): n is a, c, g, or t
  misc_feature (815)..(815): n is a, c, g, or t
  misc_feature (824)..(824): n is a, c, g, or t
  misc_feature (854)..(854): n is a, c, g, or t
  misc_feature (879)..(879): n is a, c, g, or t
  misc_feature (885)..(885): n is a, c, g, or t
  misc_feature (897)..(897): n is a, c, g, or t
  misc_feature (913)..(913): n is a, c, g, or t
  misc_feature (939)..(939): n is a, c, g, or t
  misc_feature (950)..(950): n is a, c, g, or t
  misc_feature (959)..(960): n is a, c, g, or t
  misc_feature (974)..(974): n is a, c, g, or t
  misc_feature (989)..(989): n is a, c, g, or t
  misc_feature (994)..(995): n is a, c, g, or t
  misc_feature (998)..(998): n is a, c, g, or t
  misc_feature (1003)..(1003): n is a, c, g, or t
  misc_feature (1006)..(1006): n is a, c, g, or t
  misc_feature (1008)..(1008): n is a, c, g, or t
  misc_feature (1015)..(1015): n is a, c, g, or t
  misc_feature (1020)..(1020): n is a, c, g, or t
  misc_feature (1025)..(1025): n is a, c, g, or t
  misc_feature (1031)..(1031): n is a, c, g, or t
  misc_feature (1034)..(1034): n is a, c, g, or t
  misc_feature (1044)..(1044): n is a, c, g, or t
  misc_feature (1046)..(1046): n is a, c, g, or t
  misc_feature (1053)..(1053): n is a, c, g, or t
  misc_feature (1055)..(1056): n is a, c, g, or t
  misc_feature (1058)..(1058): n is a, c, g, or t
  misc_feature (1060)..(1060): n is a, c, g, or t
ggtgccactgaagatcctggtgtcgccatgggccgccgccccgcccgttgttaccggtattgtaagaacaagccgtacccaaagtctcgcttctgccgaggtgtccctgatgccaagattcgcatttttgacctggggcggaaaaaggcaaaagtggatgagtttccgctttgtggccacatggtgtcagatgaatatgagcagctgtcctctgaagccctggaggctgcccgaatttgtgccaataagtacatggtaaaaagttgtggcaaagatggcttccatatccgggtgcggctccaccccttccacgtcatccgcatcaacaagatgttgtcctgtgctggggctgacaggtgagcttggtctgggccttttaaggcagttggagtctctacattattaggcttgcattattttatcagagcatagaggtggccccagtgactcagccactatggctactagaaaagccaggctggcaagtgactttcagtggtcactcaggaccccttcctgcagatacaaacaaagcatgagtaagtcttagcaagctcttccccacaggttaggggaaacactggtgatgggagtagctcttcttgcttttagctgaatgacaaccatcttgccagcaggtagctgaagctggcagaggagcccagtggcgccttttcagtggttcttgggatgctccgcagccaattaagccgactgagttcctttcctcatggggacccagtgtgcgatggctgcacacagcagcttccttggtantgtacgcagcctgttggttgtatgggttgctctaaggnaccttgganacaggcctttcaggtggatgttcatgtttnctgaccttgcactaccccaatgtangctccnaacaggcatgcnaggtgcctttggaaanccccagggcactgtggccagggttcnaattggccaanttatcatgnnccatccccaccaanctgcaaaaaaagaancatgnnatngaagnccngncccaggnccaanttaanttttcnggncccccaaaangnatgtaangnngnanccccctt

SEQ ID NO: 221 - DNA, 585 bp, Homo sapiens
gccatcatggcgcaggatcaaggtgaaaaggagaaccccatgcgggaacttcgcatccgcaaactctgtctcaacatctgtgttggggagagtggagacagactgacgcgagcagccaaggtgttggagcagctcacagggcagacccctgtgttttccaaagctagatacactgtcagatcctttggcatccggagaaatgaaaagattgctgtccactgcacagttcgaggggccaaggcagaagaaatcttggagaagggtctaaaggtgcgggagtatgagttaagaaaaaacaacttctcagatactggaaactttggttttgggatccaggaacacatcgatctgggtatcaaatatgacccaagcattggtatctacggcctggacttctatgtggtgctgggtaggccaggtttcagcatcgcagacaagaagcgcaggacaggctgcattggggccaaacacagaatcagcaaagaggaggccatgcgctggttccagcagaagtatgatgggatcatccttcctggcaaataaattcccgtttctatccaaaagagcaataaaaagttttcagtg

SEQ ID NO: 222 - DNA, 456 bp, Homo sapiens
gcaaggtgcaacttccttcggtcgtcccgaatccgggttcatccgacaccagccgcctccaccatgccgccgaagttcgaccccaacgagatcaaagtcgtatacctgaggtgcaccggaggtgaagtcggtgccacttctgcctctgccctgatcatcaaagccctcaaggaaccaccaagagacagaaagaaacagaaaaacattaaacacagtgggaatatcacttttgatgagattgtcaacattgctcgacagatgcggcaccgatccttagccagagaactctctggaaccattaaagagatcctggggactgcccagtcagtgggctgtaatgttgatggccgccatcctcatgacatcatcgatgacatcaacagtggtgctgtggaatgcccagccagttaagcacaaaggaaaacatttcaataaaggatcatttgacaactggtg

SEQ ID NO: 223 - DNA, 375 bp, Homo sapiens
gcgaggaggcggaacaagtccacggagtccctgcagaccaacgtgcagcggctgaaggagtaccgctccaaactcatcctcttccccaggaagccctcggcccccaagaagggagacagttctgctgaagaactgaaactggccacccagctgaccggaccggtcatgcccgtccggaacgtctataagaaggagaaagctcgagtcatcactgaggaagagaagaatttcaaagccttcgctagtctccgtatggcccgtgccaacgcccggctcttcggcatacgggcaaaaagagccaaggaagccgcagaacaggatgttgaaaagaaaaaataaagccctcctggggacttggaatcagtcggcagtcat

SEQ ID NO: 224 - DNA, 661 bp, Homo sapiens
  misc_feature (637)..(641): n is a, c, g, or t
  misc_feature (644)..(644): n is a, c, g, or t
  misc_feature (652)..(652): n is a, c, g, or t
  misc_feature (659)..(660): n is a, c, g, or t
gggagaaagaagcagtctgatgtcatgcgctttcttctgagggtccgctgctggcagtaccgccagctctctgctctccacagggctccccgccccacccggcctgataaagcgcgccgactgggctacaaggccaagcaaggttacgttatatataggattcgtgttcgccgtggtggccgaaaacgcccagttcctaagggtgcaacttacggcaagcctgtccatcatggtgttaaccagctaaagtttgctcgaagccttcagtccgttgcagaggagcgagctggacgccactgtggggctctgagagtcctgaattcttactgggttggtgaagattccacatacaaattttttgaggttatcctcattgatccattccataaagctatcagaagaaatcctgacacccagtggatcaccaaaccagtccacaagcacagggagatgcgtgggctgacatctgcaggccgaaagagccgtggccttggaaagggccacaagttccaccacactattggtggctctcgccgggcagcttggagaaggcgcaatactctccagctccaccgttaccgctaatataagtaaagtttgtaaaattcatacttaataaacaatttaggacagtccnnnnnganaaaagaanaataaanng

SEQ ID NO: 225 - DNA, 598 bp, Homo sapiens
ggatctgtgaaaatggttcgctattcacttgacccggagaaccccacgaaatcatgcaaatcaagaggttccaatcttcgtgttcactttaagaacactcgtgaaactgctcaggccatcaagggtatgcatatacgaaaagccacgaagtatctgaaagatgtcactttacagaaacagtgtgtaccattccgacgttacaatggtggagttggcaggtgtgcgcaggccaagcaatggggctggacacaaggtcggtggcccaaaaagagtgctgaatttttgctgcacatgcttaaaaacgcagagagtaatgctgaacttaagggtttagatgtagattctctggtcattgagcatatccaagtgaacaaagcacctaagatgcgccgccggacctacagagctcatggtcggattaacccatacatgagctctccctgccacattgagatgatccttacggaaaaggaacagattgttcctaaaccagaagaggaggttgcccagaagaaaaagatatcccagaagaaactgaagaaacaaaaacttatggcacgggagtaaattcagcattaaaataaatgtaattaaaagg

SEQ ID NO: 226 - DNA, 628 bp, Homo sapiens
ggccgagcaggaggcgccatcatgggagtggacatccgccataacaaggaccgaaaggttcggcgcaaggagcccaagagccaggatatctacctgaggctgttggtcaagttatacaggtttctggccagaagaaccaactccacattcaaccaggttgtgttgaagaggttgtttatgagtcgcaccaaccggccgcctctgtccctttcccggatgatccggaagatgaagcttcctggccgggaaaacaagacggccgtggttgtggggaccataactgatgatgtgcgggttcaggaggtacccaaactgaaggtatgtgcactgcgcgtgaccagccgggcccgcagccgcatcctcagggcagggggcaagatcctcactttcgaccagctggccctggactcccctaagggctgtggcactgtcctgctctccggtcctcgcaagggccgagaggtgtaccggcatttcggcaaggccccaggaaccccgcacagccacaccaaaccctacgtccgctccaagggccggaagttcgagcgtgccagaggccgacgggccagccgaggctacaaaaactaaccctggatcctactctcttattaaaaagatttttgctgac

SEQ ID NO: 227 - DNA, 639 bp, Homo sapiens
  misc_feature (611)..(611): n is a, c, g, or t
  misc_feature (616)..(616): n is a, c, g, or t
  misc_feature (618)..(625): n is a, c, g, or t
  misc_feature (628)..(636): n is a, c, g, or t
  misc_feature (638)..(639): n is a, c, g, or t
ggcggcgaacgcggagagcacgccatgaaggcctcgggcacgctacgagagtacaaggtagtgggtcgctgcctgcccacccccaaatgccacacgccgcccctctaccgcatgcgaatctttgcgcctaatcatgtcgtcgccaagtcccgcttctggtactttgtatctcagttaaagaagatgaagaagtcttcaggggagattgtctactgtgggcaggtgtttgagaagtcccccctgcgggtgaagaacttcgggatctggctgcgctatgactcccggagcggcacccacaacatgtaccgggaataccgggacctgaccaccgcaggcgctgtcacccagtgctaccgagacatgggtgcccggcaccgcgcccgagcccactccattcagatcatgaaggtggaggagatcgcggccagcaagtgccgccggccggctgtcaagcagttccacgactccaagatcaagttcccgctgccccaccgggtcctgcgccgtcagcacaagccacgcttcaccaccaagaggcccaacaccttcttctaggtgcagggccctcgtccgggtgtgccccaaataaactcaggaacgccccggaaaanaaaanannnnnnnnaannnnnnnnnann

SEQ ID NO: 228 - DNA, 413 bp, Homo sapiens
ggtgatattgtagacatcaagggaatgggtactgttcaaaaaggaatgccccacaagtgttaccatggcaaaactggaagagtctacaatgttacccagcatgctgttggcattgttgtaaacaaacaagttaagggcaagattcttgccaagagaattaatgtgcgtattgagcacattaagcactctaagagccgagatagcttcctgaaacgtgtgaaggaaaatgatcagaaaaagaaagaagccaaagagaaaggtacctgggttcaactaaagcgccagcctgctccacccagagaagcacactttgtgagaaccaatgggaaggagcctgagctgctggaacctattccctatgaattcatggcataataggtgttaaaaaaaaaaataaaggacctctgggctac

SEQ ID NO: 229 - DNA, 1144 bp, Homo sapiens
  misc_feature (808)..(808): n is a, c, g, or t
  misc_feature (853)..(853): n is a, c, g, or t
  misc_feature (855)..(855): n is a, c, g, or t
  misc_feature (860)..(860): n is a, c, g, or t
  misc_feature (862)..(862): n is a, c, g, or t
  misc_feature (889)..(889): n is a, c, g, or t
  misc_feature (896)..(896): n is a, c, g, or t
  misc_feature (898)..(898): n is a, c, g, or t
  misc_feature (920)..(920): n is a, c, g, or t
  misc_feature (937)..(937): n is a, c, g, or t
  misc_feature (944)..(944): n is a, c, g, or t
  misc_feature (947)..(947): n is a, c, g, or t
  misc_feature (955)..(956): n is a, c, g, or t
  misc_feature (960)..(960): n is a, c, g, or t
  misc_feature (965)..(966): n is a, c, g, or t
  misc_feature (974)..(974): n is a, c, g, or t
  misc_feature (990)..(990): n is a, c, g, or t
  misc_feature (1000)..(1000): n is a, c, g, or t
  misc_feature (1006)..(1006): n is a, c, g, or t
  misc_feature (1021)..(1022): n is a, c, g, or t
  misc_feature (1042)..(1042): n is a, c, g, or t
  misc_feature (1044)..(1044): n is a, c, g, or t
  misc_feature (1046)..(1046): n is a, c, g, or t
  misc_feature (1053)..(1053): n is a, c, g, or t
  misc_feature (1081)..(1081): n is a, c, g, or t
  misc_feature (1085)..(1085): n is a, c, g, or t
  misc_feature (1090)..(1090): n is a, c, g, or t
  misc_feature (1094)..(1094): n is a, c, g, or t
  misc_feature (1100)..(1100): n is a, c, g, or t
  misc_feature (1105)..(1105): n is a, c, g, or t
  misc_feature (1118)..(1119): n is a, c, g, or t
  misc_feature (1123)..(1123): n is a, c, g, or t
  misc_feature (1133)..(1134): n is a, c, g, or t
  misc_feature (1136)..(1137): n is a, c, g, or t
gccgctgccgccatggctcctgtgaaaaagcttgtggtgaaggggggcaaaaaaaagaagcaagttctgaagttcactcttgattgcacccaccctgtagaagatggaatcatggatgctgccaattttgagcagtttttgcaagaaaggatcaaagtgaacggaaaagctgggaaccttggtggaggggtggtgaccatcgaaaggagcaagagcaagatcaccgtgacatccgaggtgcctttctccaaaaggtatttgaaatatctcaccaaaaaatatttgaagaagaataatctacgtgactggttgcgcgtagttgctaacagcaaagagagttacgaattacgttacttccagattaaccaggacgaagaagaggaggaagacgaggattaaatttcatttatctggaaaattttgtatgagttcttgaataaaacttgggaaccaaaatggtggtttatccttgtatctctgcagtgtggattgaacagaaaattggaaatcatagtcaaagggcttcccttggttcgccactcatttatttgtaacttgacttctttttttttctgcttaaaaatttcaattctcgtggtaataccagagtagaaggagagggtgactttaccgaactgacagccattggggaggcagatgcgggtgtggaggtgtgggctgaaggtagtgactgtttgattttaaaaagtgtgactgtcagttgtatctgttgctttttctcaatgattcagggataccaaatgggctttctctcattcattaaaagaaaacgcgacatctttctaanattctctgtgggaaaatgactgtcaataaaatgcgggttccgggncnatccncntactttcatttttgattacaaatttcnctggacncncacaattatgtccgctaatccncttcttcctaaaaaaanaaactgngcnccttcagnntggntgccnnaaaggggnttggggaacccattgnaaaaatcccnggttcnaaattaactaattgnnacaaaaatgaaccggtaaanangnttctaanggtctttgcaaaaaatgttcctttcctncccnccaanggancgtagnaaaangctcccaatgggnncccnggggggcccnnanngggcccc

SEQ ID NO: 230 - DNA, 505 bp, Homo sapiens
  misc_feature (504)..(505): n is a, c, g, or t
gccatcaccgaagcgggagcggccaaaatgaagtttaatccctttgtgacttccgaccgaagcaagaatcgcaaaaggcatttcaatgcaccttcccatattcgaaggaagattatgtcttcccctctttccaaagagctgagacagaagtacaacgtgcgatccatgcccatccgaaaggatgatgaagttcaggttgtacgtggacactataaaggtcagcaaattggcaaagtagtccaggtttacaggaagaaatatgttatctacattgaacgggtgcagcgggaaaaggctaatggcacaactgtccacgtaggcattcaccccagcaaggtggttatcactaggctaaaactggacaaagaccgcaaaaagatcctcgaacggaaagccaaatctcgccaagtaggaaaggaaaagggcaaatacaaggaagaaaccattgagaagatgcaggaataaagtaatcttatatacaagctttgattaaaacttgaaacnn

SEQ ID NO: 231 - DNA, 666 bp, Homo sapiens
  misc_feature (643)..(666): n is a, c, g, or t
ggcgcttcgggagccgcggcttatggtgcagacatggccaagtccaagaaccacaccacacacaaccagtcccgaaaatggcacagaaatggtatcaagaaaccccgatcacaaagatacgaatctcttaagggggtggaccccaagttcctgaggaacatgcgctttgccaagaagcacaacaaaaagggcctaaagaagatgcaggccaacaatgccaaggccatgagtgcacgtgccgaggctatcaaggccctcgtaaagcccaaggaggttaagcccaagatcccaaagggtgtcagccgcaagctcgatcgacttgcctacattgcccaccccaagcttgggaagcgtgctcgtgcccgtattgccaaggggctcaggctgtgccggccaaaggccaaggccaaggccaaggccaaggccaaggatcaaaccaaggcccaggctgcagccccagcttcagttccagctcaggctcccaaacgtacccaggcccctacaaaggcttcagagtagatctctgccaacatgaggacagaaggactggtgcgaccccccacccccgcccctgggctaccatctgcatggggctggggtcctcctgtgctatttgtacaaataaacctgaggcaggaaaaannnnnnnnnnnnnnnnnnnnnnnn

SEQ ID NO: 232 - DNA, 421 bp, Homo sapiens
ggcagaatggctcccgcaaagaagggtggcgagaagaaaaagggccgttctgccatcaacgaagtggtaacccgagaatacaccatcaacattcacaagcgcatccatggagtgggcttcaagaagcgtgcacctcgggcactcaaagagattcggaaatttgccatgaaggagatgggaactccagatgtgcgcattgacaccaggctcaacaaagctgtctgggccaaaggaataaggaatgtgccataccgaatccgtgtgcggctgtccagaaaacgtaatgaggatgaagattcaccaaataagctatatactttggttacctatgtacctgttaccactttcaaaaatctacagacagtcaatgtggatgagaactaatcgctgatcgtcagatcaaataaagttataaaattgc

SEQ ID NO: 233 - DNA, 1129 bp, Homo sapiens
  misc_feature (755)..(755): n is a, c, g, or t
  misc_feature (853)..(853): n is a, c, g, or t
  misc_feature (857)..(857): n is a, c, g, or t
  misc_feature (873)..(873): n is a, c, g, or t
  misc_feature (876)..(876): n is a, c, g, or t
  misc_feature (903)..(903): n is a, c, g, or t
  misc_feature (946)..(946): n is a, c, g, or t
  misc_feature (956)..(956): n is a, c, g, or t
  misc_feature (981)..(981): n is a, c, g, or t
  misc_feature (990)..(990): n is a, c, g, or t
  misc_feature (998)..(998): n is a, c, g, or t
  misc_feature (1011)..(1011): n is a, c, g, or t
  misc_feature (1019)..(1019): n is a, c, g, or t
  misc_feature (1028)..(1028): n is a, c, g, or t
  misc_feature (1041)..(1041): n is a, c, g, or t
  misc_feature (1045)..(1045): n is a, c, g, or t
  misc_feature (1052)..(1052): n is a, c, g, or t
  misc_feature (1056)..(1056): n is a, c, g, or t
  misc_feature (1059)..(1059): n is a, c, g, or t
  misc_feature (1066)..(1066): n is a, c, g, or t
  misc_feature (1070)..(1070): n is a, c, g, or t
  misc_feature (1074)..(1074): n is a, c, g, or t
  misc_feature (1076)..(1076): n is a, c, g, or t
  misc_feature (1080)..(1080): n is a, c, g, or t
  misc_feature (1088)..(1088): n is a, c, g, or t
  misc_feature (1090)..(1090): n is a, c, g, or t
  misc_feature (1092)..(1092): n is a, c, g, or t
  misc_feature (1095)..(1095): n is a, c, g, or t
  misc_feature (1098)..(1098): n is a, c, g, or t
  misc_feature (1104)..(1104): n is a, c, g, or t
  misc_feature (1112)..(1112): n is a, c, g, or t
  misc_feature (1121)..(1121): n is a, c, g, or t
ggccatcttggctcctgtggaggcctgctgggaacgggacttctaaaaggaactatgtctggaaggctgtggtccaaggccatttttgctggctataagcggggtctccggaaccaaagggagcacacagctcttcttaaaattgaaggtgtttacgcccgagatgaaacagaattctatttgggcaagagatgcgcttatgtatataaagcaaagaacaacacagtcactcctggcggcaaaccaaacaaaaccagagtcatctggggaaaagtaactcgggcccatggaaacagtggcatggttcgtgccaaattccgaagcaatcttcctgctaaggccattggacacagaatccgagtgatgctgtacccctcaaggatttaaactaacgaaaaatcaataaataaatgtggatttgtgctcttgtatttttaagtggattaaaaaacttactaccttaaattgatttgctacatgcttaaaatgatagaggttgctcagcatttttggagtacaagggggtcagagagacatgtgatgaaaattacagggcgagtacagagatttagaagggaacgggttttaatgcgagtatctttgacagagtcttgctctgttgcccatgctggagtgtagtggtgctcgctgcagcctcacattcaaaggctcaagcaatcctcccttggcctttgaagtagctgggaccacaggctcatgccaccatccctgggtcatttttaaattttttgtanagagggtctgactcttgcctatgctggcttcaactcctgggctcaagcaatcctccttccttggcctctcctgaagtgctggaaacagttatgagccncccncctgccaagtgcttgnganactatgcatttgttcatgcaaatgggnaacttaaatttgaatggaaatttgttgatgggctttggcagtncattggaaanactgggatgaaaactcttgggactnggactgganaaaccttnccgtaattaaaanaaattaanccatttacncccctcaaaaaancaanccttggnaggnacntgggagntggnaaangnccgnaaaggggncncnttnttnggctcnggttttanccgggaaantcaaaatg

SEQ ID NO: 234 - DNA, 1166 bp, Homo sapiens
  misc_feature (802)..(802): n is a, c, g, or t
  misc_feature (836)..(836): n is a, c, g, or t
  misc_feature (926)..(926): n is a, c, g, or t
  misc_feature (943)..(943): n is a, c, g, or t
  misc_feature (949)..(949): n is a, c, g, or t
  misc_feature (972)..(972): n is a, c, g, or t
  misc_feature (975)..(975): n is a, c, g, or t
  misc_feature (979)..(979): n is a, c, g, or t
  misc_feature (981)..(981): n is a, c, g, or t
  misc_feature (984)..(984): n is a, c, g, or t
  misc_feature (987)..(987): n is a, c, g, or t
  misc_feature (996)..(996): n is a, c, g, or t
  misc_feature (1001)..(1001): n is a, c, g, or t
  misc_feature (1004)..(1004): n is a, c, g, or t
  misc_feature (1015)..(1015): n is a, c, g, or t
  misc_feature (1025)..(1025): n is a, c, g, or t
  misc_feature (1032)..(1032): n is a, c, g, or t
  misc_feature (1034)..(1034): n is a, c, g, or t
  misc_feature (1037)..(1037): n is a, c, g, or t
  misc_feature (1039)..(1039): n is a, c, g, or t
  misc_feature (1050)..(1050): n is a, c, g, or t
  misc_feature (1072)..(1072): n is a, c, g, or t
  misc_feature (1078)..(1078): n is a, c, g, or t
  misc_feature (1080)..(1080): n is a, c, g, or t
  misc_feature (1091)..(1091): n is a, c, g, or t
  misc_feature (1106)..(1106): n is a, c, g, or t
  misc_feature (1108)..(1108): n is a, c, g, or t
  misc_feature (1116)..(1116): n is a, c, g, or t
  misc_feature (1119)..(1119): n is a, c, g, or t
  misc_feature (1122)..(1122): n is a, c, g, or t
  misc_feature (1140)..(1140): n is a, c, g, or t
  misc_feature (1145)..(1145): n is a, c, g, or t
  misc_feature (1152)..(1152): n is a, c, g, or t
  misc_feature (1154)..(1154): n is a, c, g, or t
  misc_feature (1159)..(1160): n is a, c, g, or t
gcccacgcgtccggccgcagaagcgagatgacgaagggaacgtcatcgtttggaaagcgtcgcaataagacgcacacgttgtgccgccgctgtggctctaaggcctaccaccttcagaagtcgacctgtggcaaatgtggctaccctgccaagcgcaagagaaagtataactggagtgccaaggctaaaagacgaaataccaccggaactggtcgaatgaggcacctaaaaattgtataccgcagattcaggcatggattccgtgaaggaacaacacctaaacccaagagggcagctgttgcagcatccagttcatcttaagaatgtcaacgattagtcatgcaataaatgttctggttttaaaaaatacatatctggttttggagtttggatcataatacaagagaagcacagggcaaagacactgcataacctcaagaactaagaatggaaggactggccaggcctggtggtgcacacctgtaatcccagctactcaggaggctgaggcgagagaatcgcttgagcctggggggcagaggttgcagtgagctgagagaacggcgggcggcagagcgagactccatctcaaaaaaaaaaaaggataaaggaaggacttaagcaaaatcttccttgtaagtagaaggatgttttgacaagaaaagttgcaatggaaaaatggttctcatgtacacgagtatgtagaataagcatcgtgtgtggattggattcagatcaaaacattgcttttatgtttgtgtctttatacggggggagtataccctggtgccccaggatgaanacttgacctgacccatgtatttttagattactcncagataacaaagtattttcatcatgattagttgcgaaaacagttttatttcaataggtaaaacgtgcagtcctatgtaatcgtcaaaagnaatcttaattatagctngggtgngctttaaactgcaacctggcagnganggcncnatnccnctgattccncttcnccntaaacttttcnggaccggganctgcaantnacncntgggaattaantgtaaactgggggtacaaaggngagagngnggaaaaggganttttcctgggggggngntttagatnccnggncccccaaaaataaccccnttttntcccccncnttttnnaccctt

SEQ ID NO: 235 - DNA, 790 bp, Homo sapiens
  misc_feature (756)..(757): n is a, c, g, or t
  misc_feature (767)..(767): n is a, c, g, or t
  misc_feature (770)..(776): n is a, c, g, or t
  misc_feature (778)..(778): n is a, c, g, or t
  misc_feature (781)..(782): n is a, c, g, or t
  misc_feature (784)..(789): n is a, c, g, or t
gcggacgcgtgggcggacctaggtcgcggcgacatggccaaacgtaccaagaaagtcgggatcgtcggtaaatacgggacccgctatggggcctccctccggaaaatggtgaagaaaattgaaatcagccagcacgccaagtacacttgctctttctgtggcaaaaccaagatgaagagacgagctgtggggatctggcactgtggttcctgcatgaagacagtggctggcggtgcctggacgtacaataccacttccgctgtcacggtaaagtccgccatcagaagactgaaggagttgaaagaccagtagacgctcctctactctttgagacatcactggcctataataaatgggttaatttatgtaacaaaattgccttggcttgttaactttattagacattctgatgtttgcattgtgtaaatactgttgtattggaaaagcatgccaagatggattattgtaattcagtgtcttttttagtagtcaaatggtaaaatgcagcataagaatataagtcttccaagttagatatgagtgttagctttttataagtctgctcctgccagtttgactttgagatacattggagccaactgtaaactttagtttttaaattacagttagtttttttgtttgtttttgaggcggagtctctgttacccaggctggagtgcagtataccagtcttggcccacttcaacctccacttcttaggttcaagcgattctcctgcctcagcctctgaatggnngggggaattncannnnnnncnccnncnnnnnng

SEQ ID NO: 236 - DNA, 987 bp, Homo sapiens
  misc_feature (847)..(847): n is a, c, g, or t
  misc_feature (852)..(852): n is a, c, g, or t
  misc_feature (855)..(855): n is a, c, g, or t
  misc_feature (858)..(858): n is a, c, g, or t
  misc_feature (861)..(861): n is a, c, g, or t
  misc_feature (865)..(865): n is a, c, g, or t
  misc_feature (894)..(894): n is a, c, g, or t
  misc_feature (897)..(897): n is a, c, g, or t
  misc_feature (904)..(904): n is a, c, g, or t
  misc_feature (908)..(908): n is a, c, g, or t
  misc_feature (915)..(915): n is a, c, g, or t
  misc_feature (919)..(919): n is a, c, g, or t
  misc_feature (975)..(987): n is a, c, g, or t
gtggatgattatccgaaatgtttcattgtgggagcagacaatgtgggctccaagcagatgcagcagatccgcatgtcccttcgcgggaaggctgtggtgctgatgggcaagaacaccatgatgcgcaaggccatccgagggcacctggaaaacaacccagctctggagaaactgctgcctcatatccgggggaatgtgggctttgtgttcaccaaggaggacctcactgagatcagggacatgttgctggccaataaggtgccagctgctgcccgtgctggtgccattgccccatgtgaagtcactgtgccagcccagaacactggtctcgggcccgagaagacctcctttttccaggctttaggtatcaccactaaaatctccaggggcaccattgaaatcctgagtgatgtgcagctgatcaagactggagacaaagtgggagccagcgaagccacgctgctgaacatgctcaacatctcccccttctcctttgggctggtcatccagcaggtgttcgacaatggcagcatctacaaccctgaagtgcttgatatcacagaggaaactctgcattctcgcttcctggagggtgtccgcaatgttgccagtgtctgtctgcagattggctacccaactgttgcatcagtaccccattctatcatcaacgggtacaaacgagtcctggccttgtctgtggagacggattacaccttcccacttgctgaaaaggtcaaggccttcttggctgatccatctgcctttgtggctgctgcccctgtggctgctgccaccacagctgctcctgctgctgctgcagccccagctaaggttgaagccaaggaanaatcngangantcngacnaggatatgggatttggtctctttgactantcnccaaaangcanccaactnaccngtttttatttgcaaaacaaggaaataaaggcttacttcttttaaaaaaaaaaaaannnnnnnnnnnnn

SEQ ID NO: 237 - DNA, 459 bp, Homo sapiens
  misc_feature (459)..(459): n is a, c, g, or t
gcccacgcgtccgccctgtcgccaccgaggtcgcacgcgtgagacttctccgccgcagacgccgccgcgatgcgctacgtcgcctcctacctgctggctgccctagggggcaactcctcccccagcgccaaggacatcaagaagatcttggacagcgtgggtatcgaggcggacgacgaccggctcaacaaggttatcagtgagctgaatggaaaaaacattgaagacgtcattgcccagggtattggcaagcttgccagtgtacctgctggtggggctgtagccgtctctgctgccccaggctctgcagcccctgctgctggttctgcccctgctgcagcagaggagaagaaagatgagaagaaggaggagtctgaagagtcagatgatgacatgggatttggcctttttgattaaattcctgctcccctgcaaataaagcctttttacacatctaan

SEQ ID NO: 238 - DNA, 960 bp, Homo sapiens
  misc_feature (750)..(750): n is a, c, g, or t
  misc_feature (784)..(784): n is a, c, g, or t
  misc_feature (786)..(786): n is a, c, g, or t
  misc_feature (838)..(838): n is a, c, g, or t
  misc_feature (844)..(844): n is a, c, g, or t
  misc_feature (851)..(851): n is a, c, g, or t
  misc_feature (853)..(853): n is a, c, g, or t
  misc_feature (862)..(862): n is a, c, g, or t
  misc_feature (868)..(868): n is a, c, g, or t
  misc_feature (883)..(884): n is a, c, g, or t
  misc_feature (889)..(889): n is a, c, g, or t
  misc_feature (895)..(895): n is a, c, g, or t
  misc_feature (897)..(897): n is a, c, g, or t
  misc_feature (908)..(909): n is a, c, g, or t
  misc_feature (918)..(918): n is a, c, g, or t
  misc_feature (922)..(922): n is a, c, g, or t
  misc_feature (933)..(934): n is a, c, g, or t
  misc_feature (943)..(943): n is a, c, g, or t
  misc_feature (946)..(948): n is a, c, g, or t
  misc_feature (950)..(951): n is a, c, g, or t
  misc_feature (953)..(954): n is a, c, g, or t
  misc_feature (957)..(958): n is a, c, g, or t
gcaaaacaccaaatggcggatgacgccggtgcagcgggggggcccgggggccctggtggccctgggatggggaaccgcggtggcttccgcggaggtttcggcagtggcatccggggccggggtcgcggccgtggacggggccggggccgaggccgcggagctcgcggaggcaaggccgaggataaggagtggatgcccgtcaccaagttgggccgcttggtcaaggacatgaagatcaagtccctggaggagatctatctcttctccctgcccattaaggaatcagagatcattgatttcttcctgggggcctctctcaaggatgaggttttgaagattatgccagtgcagaagcagacccgtgccggccagcgcaccaggttcaaggcatttgttgctatcggggactacaatggccacgtcggtctgggtgttaagtgctccaaggaggtggccaccgccatccgtggggccatcatcctggccaagctctccatcgtccccgtgcgcagaggctactgggggaacaagatcggcaagccccacactgtcccttgcaaggtgacaggccgctgcggctctgtgctggtacgcctcatccctgcacccaggggcactggcatcgtctccgcacctgtgcctaagaagctgctcatgatggctggtatcgatgactgctacacctcagcccggggctgcactgccaccctgggcaacttcgccaaggccacctttgatgccatttctaanacctacagctacctgacccccgacctctggaagnanactgtattccccaagtctccctatcaggagttcactgacccacctcgtcaanacccanaccaaantntccgtgcancggaanttcaggctccagctnnggctncaacananggttttttatnnaaaaaaaanaaantgaattaaacnntgaaaaaanaannnannannaannaa

SEQ ID NO: 239 - DNA, 806 bp, Homo sapiens
  misc_feature (661)..(661): n is a, c, g, or t
  misc_feature (736)..(736): n is a, c, g, or t
  misc_feature (781)..(784): n is a, c, g, or t
  misc_feature (787)..(806): n is a, c, g, or t
gagcgcggcggcgagatggcagtgcaaatatccaagaagaggaagtttgtcgctgatggcatcttcaaagctgaactgaatgagtttcttactcgggagctggctgaagatggctactctggagttgaggtgcgagttacaccaaccaggacagaaatcattatcttagccaccagaacacagaatgttcttggtgagaagggccggcggattcgggaactgactgctgtagttcagaagaggtttggctttccagagggcagtgtagagctttatgctgaaaaggtggccactagaggtctgtgtgccattgcccaggcagagtctctgcgttacaaactcctaggagggcttgctgtgcggagggcctgctatggtgtgctgcggttcatcatggagagtggggccaaaggctgcgaggttgtggtgtctgggaaactccgaggacagagggctaaatccatgaagtttgtggatggcctgatgatccacagcggagaccctgttaactactacgttgacactgctgtgcgccacgtgttgctcagacagggtgtgctgggcatcaaggtgaagatcatgctgcctgaccacgtgagcattgtggaacccaaagatgagatactgcccaccacccccatctcagaacagaagggtgggnaagccagagccgcctgccatgccccagccagtccccacagcataacagggtctccttggcagctgtattctggantctggatgttgctctctaaagacctttaataaaaattttgtaccnnnnaannnnnnnnnnnnnnnnnnnn

SEQ ID NO: 240 - DNA, 881 bp, Homo sapiens
  misc_feature (799)..(799): n is a, c, g, or t
  misc_feature (814)..(814): n is a, c, g, or t
  misc_feature (849)..(849): n is a, c, g, or t
  misc_feature (856)..(858): n is a, c, g, or t
  misc_feature (862)..(864): n is a, c, g, or t
  misc_feature (866)..(866): n is a, c, g, or t
  misc_feature (868)..(871): n is a, c, g, or t
  misc_feature (873)..(873): n is a, c, g, or t
  misc_feature (875)..(879): n is a, c, g, or t
  misc_feature (881)..(881): n is a, c, g, or t
ggcaccatggcggttggcaagaacaagcgccttacgaaaggcggcaaaaagggagccaagaagaaagtggttgatccattttctaagaaagattggtatgatgtgaaagcacctgctatgttcaatataagaaatattggaaagacgctcgtcaccaggacccaaggaaccaaaattgcatctgatggtctcaagggtcgtgtgtttgaagtgagtcttgctgatttgcagaatgatgaagttgcatttagaaaattcaagttgattactgaagatgttcagggtaaaaactgcctgactaacttccatggcatggatcttacccgtgacaaaatgtgttccatggtcaaaaaatggcagacaatgattgaagctcacgttgatgtcaagactaccgatggttacttgcttcgtctgttctgtgttggttttactaaaaaacgcaacaatcagatacggaagacctcttatgctcagcaccaacaggtccgccaaatccggaagaagatgatggaaatcatgacccgagaggtgcagacaaatgacttgaaagaagtggtcaataaattgattccagacagcattggaaaagacatagaaaaggcttgccaatctatttatcctctccatgatgtcttcgttagaaaagtaaaaatgctgaagaagcccaagtttgaattgggaaagctcatggagcttcatggtgaaggcagtagttctggaaaagccactggggacgagacaggtgctaaagttgaacgagctgatggatatgaaccaccagtccaagaatctgttnaaggttcagacttcnaatagtggcaaataaaaaagtgctattttgtgaanaaaaaannnaaannnanannnnanannnnnan

SEQ ID NO: 241 - DNA, 900 bp, Homo sapiens
  misc_feature (767)..(767): n is a, c, g, or t
  misc_feature (771)..(771): n is a, c, g, or t
  misc_feature (795)..(795): n is a, c, g, or t
  misc_feature (800)..(800): n is a, c, g, or t
  misc_feature (832)..(832): n is a, c, g, or t
  misc_feature (865)..(865): n is a, c, g, or t
  misc_feature (876)..(876): n is a, c, g, or t
  misc_feature (878)..(878): n is a, c, g, or t
  misc_feature (880)..(881): n is a, c, g, or t
  misc_feature (884)..(885): n is a, c, g, or t
  misc_feature (887)..(887): n is a, c, g, or t
  misc_feature (889)..(893): n is a, c, g, or t
  misc_feature (895)..(900): n is a, c, g, or t
gctaacgcagccatggctcgtggtcccaagaagcatctgaagcgggtggcagctccaaagcattggatgctggataaattgaccggtgtgtttgctcctcgtccatccaccggtccccacaagttgagagagtgtctccccctcatcattttcctgaggaacagacttaagtatgccctgacaggagatgaagtaaagaagatttgcatgcagcggttcattaaaatcgatggcaaggtccgaactgatataacctaccctgctggattcatggatgtcatcagcattgacaagacgggagagaatttccgtctgatctatgacaccaagggtcgctttgctgtacatcgtattacacctgaggaggccaagtacaagttgtgcaaagtgagaaagatctttgtgggcacaaaaggaatccctcatctggtgactcatgatgcccgcaccatccgctaccccgatcccctcatcaaggtgaatgataccattcagattgatttagagactggcaagattactgatttcatcaagttcgacactggtaacctgtgtatggtgactggaggtgctaacctaggaagaattggtgtgatcaccaacagagagaggcaccctggatcttttgacgtggttcacgtgaaagatgccaatggcaacagctttgccactcgactttccaacatttttgttattggcaagggcaacaaaccatggatttctcttcccccgaggaaagggtatccgcctcaccattgctgaaaganaganacaaaaagactggcggccaaacanagcantgggtgaaatgggtccctgggtgacatgtcanatcttttgtacgtaattaaaaataattggggcnggattaaaaananannaannanannnnnannnnnn

SEQ ID NO: 242 - DNA, 861 bp, Homo sapiens
ggtttcgccatggcccggggccccaagaagccgttaaagcgtgttgcagcgccgaagcattggatgcttgacaaactaacgggtgtatttgcacctcgtccatcgacaggtccccacaagctgagggaatgtcttcctctgatcgtcttcctcaggaatagactcaagtatgcgttgactggagatgaggtaaagaagatatgtatgcaacgtttcatcaaaattgatggcaaggttcgagtggatgtcacataccctgctggattcatggatgtcatcagcatcgagaagacaggtgaacatttccgcctggtctatgacaccaagggccgttttgctgttcaccgcatcacagtggaagaggcaaagtacaagttgtgcaaagtgaggaagattactgtgggagtgaagggaatccctcacctggtgactcatgatgctcgaaccatccgctacccagatcctgtcatcaaggtgaacgatactgtgcagattgatttagggactggcaagataatcaactttatcaaatttgatacaggcaatttgtgtatggtgattggtggagccaacctcggtcgtgttggtgtgatcaccaacagggaaagacatcctggttcttttgatgtggtgcatgtgaaggatgccaatggcaacagctttgccacgaggctttccaacatttttgtcattggcaatggcaataaaccttggatttccctgcccaggggaaagggcattcgacttactgttgctgaagagagagataagaggctggccaccaaacagagcagtggctaaattgcagtagcagcatatctttttttctttgcacaaataaacagtgaattctcgtttctt

SEQ ID NO: 243 - DNA, 769 bp, Homo sapiens
  misc_feature (746)..(769): n is a, c, g, or t
gcccacgcgtccgccagggcggcgcgtggtctacgccgagtgacagagacgctcaggctgtgttctcaggatgaccgagtgggagacagcagcaccagcggtggcagagaccccagacatcaagctctttgggaagtggagcaccgatgatgtgcagatcaatgacatttccctgcaggattacattgcagtgaaggagaagtatgccaagtacctgcctcacagtgcagggcggtatgccgccaaacgcttccgcaaagctcagtgtcccattgtggagcgcctcactaactccatgatgatgcacggccgcaacaacggcaagaagctcatgactgtgcgcatcgtcaagcatgccttcgagatcatacacctgctcacaggcgagaaccctctgcaggtcctggtgaacgccatcatcaacagtggtccccgggaggactccacacgcattgggcgcgccgggactgtgagacgacaggctgtggatgtgtcccccctgcgccgtgtgaaccaggccatctggctgctgtgcacaggcgctcgtgaggctgccttccggaacattaagaccattgctgagtgcctggcagatgagctcatcaatgctgccaagggctcctcgaactcctatgccattaagaagaaggacgagctggagcgtgtggccaagtccaaccgctgattttcccagctgctgcccaataaacctgtctgccctttggggcagtcccagaaaaaaaaannnnnnnnnnnnnnnnnnnnnnnn

SEQ ID NO: 244 - DNA, 857 bp, Homo sapiens
  misc_feature (675)..(675): n is a, c, g, or t
  misc_feature (696)..(696): n is a, c, g, or t
  misc_feature (778)..(778): n is a, c, g, or t
  misc_feature (809)..(809): n is a, c, g, or t
  misc_feature (817)..(817): n is a, c, g, or t
  misc_feature (822)..(823): n is a, c, g, or t
  misc_feature (832)..(832): n is a, c, g, or t
  misc_feature (837)..(838): n is a, c, g, or t
  misc_feature (840)..(840): n is a, c, g, or t
  misc_feature (842)..(844): n is a, c, g, or t
  misc_feature (846)..(846): n is a, c, g, or t
  misc_feature (849)..(857): n is a, c, g, or t
ggcgcctcggaggcgttcagctgcttcaagatgaagctgaacatctccttcccagccactggctgccagaaactcattgaagtggacgatgaacgcaaacttcgtactttctatgagaagcgtatggccacagaagttgctgctgacgctctgggtgaagaatggaagggttatgtggtccgaatcagtggtgggaacgacaaacaaggtttccccatgaagcagggtgtcttgacccatggccgtgtccgcctgctactgagtaaggggcattcctgttacagaccaaggagaactggagaaagaaagagaaaatcagttcgtggttgcattgtggatgcaaatctgagcgttctcaacttggttattgtaaaaaaaggagagaaggatattcctggactgactgatactacagtgcctcgccgcctgggccccaaaagagctagcagaatccgcaaacttttcaatctctctaaagaagatgatgtccgccagtatgttgtaagaaagcccttaaataaagaaggtaagaaacctaggaccaaagcacccaagattcagcgtcttgttactccacgtgtcctgcagcacaaacggcggcgtattgctctgaagaagcagcgtaccaagaaaaataaagaagaggctgcagaatatgctaaacttttggccaanagaatgaaggaggctaagganaagcgccaggaacaaattgcgaaagagacgcaaaacttttcctctctgcgagcttctacttctaagtctgaatcccagtcanaaataagattttttttgagtaaccaaataantaagatcngagtnnggaaaaaanaaaannanannnanaannnnnnnnn

SEQ ID NO: 245 - DNA, 682 bp, Homo sapiens
  misc_feature (583)..(583): n is a, c, g, or t
gcgatgggcatctctcgggacaactggcacaagcgccgcaaaaccgggggcaagagaaagccctaccacaagaagcggaagtatgagttggggcgcccagctgccaacaccaagattggcccccgccgcatccacacagtccgtgtgcggggaggtaacaagaaataccgtgccctgaggttggacgtggggaatttctcctggggctcagagtgttgtactcgtaaaacaaggatcatcgatgttgtctacaatgcatctaataacgagctggttcgtaccaagaccctggtgaagaattgcatcgtgctcatcgacagcacaccgtaccgacagtggtacgagtcccactatgcgctgcccctgggccgcaagaagggagccaagctgactcctgaggaagaagagattttaaacaaaaaacgatctaaaaaaattcagaagaaatatgatgaaaggaaaaagaatgccaaaatcagcagtctcctggaggagcagttccagcagggcaagcttcttgcgtgcatcgcttcaaggccgggacagtgtggccgagcagatggctatgtgctagagggcaaanagttggagttctatcttaggaaaatcaaggcccgcaaaggcaaataaatccttgttttgtcttcacccatgtaataaaggtgtttattgttttgttccc

SEQ ID NO: 246 - DNA, 956 bp, Homo sapiens
  misc_feature (700)..(702): n is a, c, g, or t
  misc_feature (706)..(724): n is a, c, g, or t
  misc_feature (753)..(753): n is a, c, g, or t
  misc_feature (769)..(769): n is a, c, g, or t
  misc_feature (774)..(774): n is a, c, g, or t
  misc_feature (791)..(791): n is a, c, g, or t
  misc_feature (796)..(796): n is a, c, g, or t
  misc_feature (814)..(814): n is a, c, g, or t
  misc_feature (818)..(818): n is a, c, g, or t
  misc_feature (835)..(835): n is a, c, g, or t
  misc_feature (838)..(838): n is a, c, g, or t
  misc_feature (860)..(860): n is a, c, g, or t
  misc_feature (893)..(893): n is a, c, g, or t
  misc_feature (905)..(906): n is a, c, g, or t
  misc_feature (910)..(910): n is a, c, g, or t
  misc_feature (929)..(929): n is a, c, g, or t
gcccacgcgtccgcttaggcgcagacggggaagcggagccaacatgccagtggcccggagctgggtttgtcgcaaaacttatgtgaccccgcggagacccttcgagaaatctcgtctcgaccaagagctgaagctgatcggcgagtatgggctccggaacaaacgtgaggtctggagggtcaaatttaccctggccaagatccgcaaggccgcccgggaactgctgacgcttgatgagaaggacccacggcgtctgttcgaaggcaacgccctgctgcggcggctggtccgcattggggtgctggatgagggcaagatgaagctggattacatcctgggcctgaagatagaggatttcttagagagacgcctgcagacccaggtcttcaagctgggcttggccaagtccatccaccacgctcgcgtgctgatccgccagcgccatatcagggtccgcaagcaggtggtgaacatcccgtccttcattgtccgcctggattcccagaagcacatcgacttctctctgcgctctccctacgggggtggccgcccgggccgcgtgaagaggaagaatgccaagaagggccagggtggggctggggctggagacgacgaggaggaggattaagtccacctgtccctcctgggctgctggattgtctcgttttcctgccaaataaacaggatcagcgcttttccnnnaaannnnnnnnnnnnnnnnnnnaagggcggccgctcccctatagtgagtcntattaagcttaattanctgancttggactccctgtttnataanatccagtaatgaccctcnaaanctccctctgggattttnttncaaaaccctcggttgccccccngggcgtttttttttttgggggaaaaatccaaanctaactttgggnnaaanttttccggagctaaggaancttaaaatgggaaaaaaaaatcccttg

SEQ ID NO: 247 - DNA, 569 bp, Homo sapiens
gcggaccctgcagccgcagagatgttgatgcctaagaagaaccggattgccatttatgaactcctttttaaggagggagtcatggtggccaagaaggatgtccacatgcctaagcacccggagctggcagacaagaatgtgcccaaccttcatgtcatgaaggccatgcagtctctcaagtcccgaggctacgtgaaggaacagtttgcctggagacatttctactggtaccttaccaatgagggtatccagtatctccgtgattaccttcatctgcccccggagattgtgcctgccaccctacgccgtagccgtccagagactggcaggcctcggcctaaaggtctggagggtgagcgacctgcgagactcacaagaggggaagctgacagagatacctacagacggagtgctgtgccacctggtgccgacaagaaagccgaggctggggctgggtcagcaaccgaattccagtttagaggcggatttggtcgtggacgtggtcagccacctcagtaaaattggagaggattcttttgcattgaataaacttacagccaaaaaacctt

SEQ ID NO: 248 - DNA, 360 bp, Homo sapiens
gcccacgcgtccgccctcatccacgatggcctagcacgtggaattcgcgaagctgccaaagccttagacaagcgccaagcccatctttgtgtgcttgcatccaactgtgatgagcctatgtatgtcaagttggtggaggccctttgtgctgaacaccaaatcaacctaattaaggttgatgacaacaagaaactaggagaatgggtaggcctttgtaaaattgacagagaggggaaaccccgtaaagtggttggttgcagttgtgtagtagttaaggactatggcaaggagtctcaggccaaggatgtcattgaagagtatttcaaatgcaagaaatgaagaaataaatctttggctcac

SEQ ID NO: 249 - DNA, 514 bp, Homo sapiens
  misc_feature (514)..(514): n is a, c, g, or t
gtgatcgccgccatcatgggtcgcatgcatgctcccgggaagggcctgtcccagtcggctttaccctatcgacgcagcgtccccacttggttgaagttgacatctgacgacgtgaaggagcagatttacaaactggccaagaagggccttactccttcacagatcggtgtaatcctgagagattcacatggtgttgcacaagtacgttttgtgacaggcaataaaattttaagaattcttaagtctaagggacttgctcctgatcttcctgaagatctctaccatttaattaagaaagcagttgctgttcgaaagcatcttgagaggaacagaaaggataaggatgctaaattccgtctgattctaatagagagccggattcaccgtttggctcgatattataagaccaagcgagtcctccctcccaattggaaatatgaatcatctacagcctctgccctggtcgcataaatttgtctgtgtactcaagcaataaaatgattgtttaactaan

SEQ ID NO: 250 - DNA, 552 bp, Homo sapiens
gcccacgcgtcccacgcgtccgggtgtggagtctggagacgacgtgcagaaatggcacctcgaaaggggaaggaaaagaaggaagaacaggtcatcagcctcggacctcaggtggctgaaggagagaatgtatttggtgtctgccatatctttgcatccttcaatgacacttttgtccatgtcactgatctttctggcaaagaaaccatctgccgtgtgactggtgggatgaaggtaaaggcagaccgagatgaatcctcaccatatgctgctatgttggctgcccaggatgtggcccagaggtgcaaggagctgggtatcaccgccctacacatcaaactccgggccacaggaggaaataggaccaagacccctggacctggggcccagtcggccctcagagcccttgcccgctcgggtatgaagatcgggcggattgaggatgtcacccccatcccctctgacagcactcgcaggaaggggggtcgccgtggtcgccgtctgtgaacaagattcctcaaaatattttctgttaataaattgccttcatgt

SEQ ID NO: 251 - DNA, 475 bp, Homo sapiens
ggcaagatggcagaagtagagcagaagaagaagcggaccttccgcaagttcacctaccgcggcgtggacctcgaccagctgctggacatgtcctacgagcagctgatgcagctgtacagtgcgcgccagcggcggcggctgaaccggggcctgcggcggaagcagcactccctgctgaagcgcctgcgcaaggccaagaaggaggcgccgcccatggagaagccggaagtggtgaagacgcacctgcgggacatgatcatcctacccgagatggtgggcagcatggtgggcgtctacaacggcaagaccttcaaccaggtggagatcaagcccgagatgatcggccactacctgggcgagttctccatcacctacaagcccgtaaagcatggccggcccggcatcggggccacccactcctcccgcttcatccctctcaagtaatggctcagctaataaaggcgcacatgactcc

SEQ ID NO: 252 - DNA, 1262 bp, Homo sapiens
  misc_feature (803)..(803): n is a, c, g, or t
  misc_feature (809)..(809): n is a, c, g, or t
  misc_feature (821)..(821): n is a, c, g, or t
  misc_feature (835)..(835): n is a, c, g, or t
  misc_feature (838)..(838): n is a, c, g, or t
  misc_feature (849)..(849): n is a, c, g, or t
  misc_feature (903)..(903): n is a, c, g, or t
  misc_feature (926)..(926): n is a, c, g, or t
  misc_feature (944)..(944): n is a, c, g, or t
  misc_feature (951)..(951): n is a, c, g, or t
  misc_feature (957)..(957): n is a, c, g, or t
  misc_feature (963)..(963): n is a, c, g, or t
  misc_feature (965)..(965): n is a, c, g, or t
  misc_feature (969)..(969): n is a, c, g, or t
  misc_feature (971)..(971): n is a, c, g, or t
  misc_feature (973)..(973): n is a, c, g, or t
  misc_feature (999)..(999): n is a, c, g, or t
  misc_feature (1012)..(1012): n is a, c, g, or t
  misc_feature (1016)..(1016): n is a, c, g, or t
  misc_feature (1027)..(1027): n is a, c, g, or t
  misc_feature (1034)..(1034): n is a, c, g, or t
  misc_feature (1059)..(1060): n is a, c, g, or t
  misc_feature (1064)..(1064): n is a, c, g, or t
  misc_feature (1070)..(1070): n is a, c, g, or t
  misc_feature (1080)..(1080): n is a, c, g, or t
  misc_feature (1094)..(1095): n is a, c, g, or t
  misc_feature (1100)..(1100): n is a, c, g, or t
  misc_feature (1134)..(1134): n is a, c, g, or t
  misc_feature (1139)..(1139): n is a, c, g, or t
  misc_feature (1143)..(1143): n is a, c, g, or t
  misc_feature (1151)..(1151): n is a, c, g, or t
  misc_feature (1160)..(1161): n is a, c, g, or t
  misc_feature (1166)..(1166): n is a, c, g, or t
  misc_feature (1172)..(1172): n is a, c, g, or t
  misc_feature (1189)..(1189): n is a, c, g, or t
  misc_feature (1195)..(1195): n is a, c, g, or t
  misc_feature (1199)..(1200): n is a, c, g, or t
  misc_feature (1211)..(1211): n is a, c, g, or t
  misc_feature (1216)..(1216): n is a, c, g, or t
  misc_feature (1219)..(1219): n is a, c, g, or t
  misc_feature (1224)..(1224): n is a, c, g, or t
  misc_feature (1236)..(1236): n is a, c, g, or t
  misc_feature (1241)..(1241): n is a, c, g, or t
  misc_feature (1243)..(1243): n is a, c, g, or t
  misc_feature (1252)..(1253): n is a, c, g, or t
  misc_feature (1261)..(1261): n is a, c, g, or t
gctttccgcgccgccacaatggtgcgcatgaatgtcctggcagatgctctcaagagtatcaacaatgccgaaaagagaggcaaacgccaggtgcttattaggccgtgctccaaagtcatcgtccggtttctcactgtgatgatgaagcatggttacattggcgaatttgaaatcattgatgaccacagagctgggaaaattgttgtgaacctcacaggcaggctaaacaagtgtggggtgatcagccccagatttgacgtgcaactcaaagacctggaaaaatggcagaataatctgcttccatcccgccagtttggtttcattgtactgacaacctcagctggcatcatggaccatgaagaagcaagacgaaaacacacaggagggaaaatcctgggattctttttctagggatgtaatacatatatttacaaataaaatgcctcatggactctggtgcttccacttggtcgttttgagcctttacagcagtgtagccacagcttctgcggcagcatgcagttgcttcgtttatcggtgaatgcgattccctgaagtgactaatacagccaagggaaaaagttcttatgaaaccagtatgcctaagaaacagtcacccctgctgtctgccaaaaccaggtatttgacactaaatattttagttgtatttcagttttttttttttttttttcttttttggagacagagtctgactctattgctcaggctggagtgcagtggcgcgatcttggcccactgcaacctccacctcccgggttcaagtgattgtcctgtctcacccncctgantaactgggaatnacaagtgggtgtcnccncatccggctantttttatattttataaaaacagggtttccccatgttgcccaggctggtcttganttctgggcctcaagtgatcaccntaccccggcccccgaagngctgggnattacngccccnancccntnancccgggccaaattttcaaaattttcnaataatttttgangaanttgttttgccnggcaagnaaaattcggaaaaaagaatttaaanntggnttttgncccgacggcnggaaaaaaactggnnagaanttttttttttttttttttttttaaaaaaaacccntttcnccanggggggangggggggannatttngccccngcccccccctcccaaanaaaaantccnngcccccccccnaaaanggnaaaangggggcccctgnggggntnttttttttnnaagggggnt

SEQ ID NO: 253 - DNA, 558 bp, Homo sapiens
  misc_feature (535)..(540): n is a, c, g, or t
  misc_feature (542)..(547): n is a, c, g, or t
  misc_feature (549)..(554): n is a, c, g, or t
  misc_feature (556)..(558): n is a, c, g, or t
gcggcgccgcgcggtgaggttgtctagtccacgctcggagccatgccgtccaagggcccgctgcagtctgtgcaggtcttcggacgcaagaagacagcgacagctgtggcgcactgcaaacgcggcaatggtctcatcaaggtgaacgggcggcccctggagatgattgagccgcgcacgctacagtacaagctgctggagccagttctgcttctcggcaaggagcgatttgctggtgtagacatccgtgtccgtgtaaagggtggtggtcacgtggcccagatttatgctatccgtcagtccatctccaaagccctggtggcctattaccagaaatatgtggatgaggcttccaagaaggagatcaaagacatcctcatccagtatgaccggaccctgctggtagctgaccctcgtcgctgcgagtccaaaaagtttggaggccctggtgcccgcgctcgctaccagaaatcctaccgataagcccatcgtgactcaaaactcacttgtataataaacagtttttgagggatannnnnnannnnnnannnnnnannn

SEQ ID NO: 254 - DNA, 577 bp, Homo sapiens
  misc_feature (537)..(538): n is a, c, g, or t
  misc_feature (548)..(548): n is a, c, g, or t
  misc_feature (551)..(551): n is a, c, g, or t
  misc_feature (555)..(556): n is a, c, g, or t
  misc_feature (558)..(558): n is a, c, g, or t
  misc_feature (561)..(564): n is a, c, g, or t
  misc_feature (566)..(570): n is a, c, g, or t
  misc_feature (574)..(574): n is a, c, g, or t
  misc_feature (576)..(576): n is a, c, g, or t
gcaggaggcctacacgccgccgcttgtgctgcagccatgtctctagtgatccctgaaaagttccagcatattttgcgagtactcaacaccaacatcgatgggcggcggaaaatagcctttgccatcactgccattaagggtgtgggccgaagatatgctcatgtggtgttgaggaaagcagacattgacctcaccaagagggcgggagaactcactgaggatgaggtggaacgtgtgatcaccattatgcagaatccacgccagtacaagatcccagactggttcttgaacagacagaaggatgtaaaggatggaaaatacagccaggtcctagccaatggtctggacaacaagctccgtgaagacctggagcgactgaagaagattcgggcccatagagggctgcgtcacttctggggccttcgtgtccgaggccagcacaccaagaccactggccgccgtggccgcaccgtgggtgtgtccaagaagaaataagtctgtaggccttgtctgttaataaatagtttatatacctannaaaaaaaaanaanaaannanaannnnannnnngggngnc

SEQ ID NO: 255 - DNA, 490 bp, Homo sapiens
ggtggcgccgacaggatgggcaagtgtcgtggacttcgtactgctaggaagctccgtagtcaccgacgagaccagaagtggcatgataaacagtataagaaagctcatttgggcacagccctaaaggccaacccttttggaggtgcttctcatgcaaaaggaatcgtgctggaaaaagtaggagttgaagccaaacagccaaattctgccattaggaagtgtgtaagggtccagctgatcaagaatggcaagaaaatcacagcctttgtacccaatgacggttgcttgaactttattgaggaaaatgatgaagttctggttgctggatttggtcgcaaaggtcatgctgttggtgatattcctggagtccgctttaaggttgtcaaagtagccaatgtttctcttttggccctatacaaaggcaagaaggaaagaccaagatcataaatattaatggtgaaaacactgtagtaataaattttcatatgcc

SEQ ID NO: 256 - DNA, 383 bp, Homo sapiens
gcagaaattcgggaaaaactagccaaaatgtacaagaccacaccggatgtcatctttgtatttggattcagaactcattttggtggtggcaagacaactggctttggcatgatttatgattccctggattatgcaaagaaaaatgaacccaaacatagacttgcaagacatggcctgtatgagaagaaaaagacctcaagaaagcaacgaaaggaacgcaagaacagaatgaagaaagtcagggggactgcaaaggccaatgttggtgctggcaaaaagtgagctggagattggatcacagccgaaggagtaaaggtgctgcaatgatgttagctgtggccactgtggatttttcgcaagaacattaataaactaaaaacttc

SEQ ID NO: 257 - DNA, 470 bp, Homo sapiens
  misc_feature (469)..(470): n is a, c, g, or t
ggacgaggctgcggtgtctgctgctattctccgagcttcgcaatgccgcctaaggacgacaagaagaagaaggacgctggaaagtcggccaagaaagacaaagacccagtgaacaaatccgggggcaaggccaaaaagaagaagtggtccaaaggcaaagttcgggacaagctcaataacttagtcttgtttgacaaagctacctatgataaactctgtaaggaagttcccaactataaacttataaccccagctgtggtctctgagagactgaagattcgaggctccctggccagggcagcccttcaggagctccttagtaaaggacttatcaaactggtttcaaagcacagagctcaagtaatttacaccagaaataccaagggtggagatgctccagctgctggtgaagatgcatgaataggtccaaccagctgtacatttggaaaaataaaactttattaaatcnn

SEQ ID NO: 258 - DNA, 333 bp, Homo sapiens
gtgacgacctacgcacacgagaacatgcctctcgcaaaggatctccttcatccctctccagaagaggagaagaggaaacacaagaagaaacgcctggtgcagagccccaattcctacttcatggatgtgaaatgcccaggatgctataaaatcaccacggtctttagccatgcacaaacggtagttttgtgtgttggctgctccactgtcctctgccagcctacaggaggaaaagcaaggcttacagaaggatgttccttcaggaggaagcagcactaaaagcactctgagtcaagatgagtgggaaaccatctcaataaacacattttggat

SEQ ID NO: 259 - DNA, 526 bp, Homo sapiens
  misc_feature (525)..(526): n is a, c, g, or t
gtctgcggtggagccgccaccaaaatgcagattttcgtgaaaacccttacggggaagaccatcaccctcgaggttgaaccctcggatacgatagaaaatgtaaaggccaagatccaggataaggaaggaattcctcctgatcagcagagactgatctttgctggcaagcagctggaagatggacgtactttgtctgactacaatattcaaaaggagtctactcttcatcttgtgttgagacttcgtggtggtgctaagaaaaggaagaagaagtcttacaccactcccaagaagaataagcacaagagaaagaaggttaagctggctgtcctgaaatattataaggtggatgagaatggcaaaattagtcgccttcgtcgagagtgcccttctgatgaatgtggtgctggggtgtttatggcaagtcactttgacagacattattgtggcaaatgttgtctgacttactgtttcaacaaaccagaagacaagtaactgtatgagttaataaaagacatgaactann

SEQ ID NO: 260 - DNA, 734 bp, Homo sapiens
  misc_feature (700)..(700): n is a, c, g, or t
  misc_feature (709)..(709): n is a, c, g, or t
  misc_feature (713)..(734): n is a, c, g, or t
ggcaagatgggtcaccagcagctgtactggagccacccgcgaaaattcggccagggttctcgctcttgtcgtgtctgttcaaaccggcacggtctgatccggaaatatggcctcaatatgtgccgccagtgtttccgtcagtacgcgaaggatatcggtttcattaagaaagacctgagctgtcttccttggcactgcctatggaggtgacacccatctcctccatcatggccatcctgagaccgctcgcgaagcccaagatcatcaaaaagagcaccaagttcactgggaaccagtcagactgatatgtcaaaattaagggtaactggtggaaacacagaggtattgacaacagggttcatagaaggtttgagggccagatctatgcccaacattggttatgggagaaacaaaaagacaaagcacatactgcccagtggcttctggaagttcctggtccacaacgttaaggagctggaagtactgctggtgagcaacaaatcttactgtgttgagatcactcatgatgtttcttccaagaactgcaaagccatcttggaaagagcagcccaggtggtcatcagagtcaccaatgccaatgccagcctgcacagtgcagaaagtgaatagacagtgaatgtgtttgttttattggggtttaaataaaaccaataaaactgtaaaaacaaaaaccaccaanaaaaaaaanaaannnnnnnnnnnnnnnnnnnnnn

SEQ ID NO: 261 - DNA, 1238 bp, Homo sapiens
  misc_feature (724)..(724): n is a, c, g, or t
  misc_feature (860)..(860): n is a, c, g, or t
  misc_feature (862)..(862): n is a, c, g, or t
  misc_feature (893)..(893): n is a, c, g, or t
  misc_feature (906)..(906): n is a, c, g, or t
  misc_feature (909)..(909): n is a, c, g, or t
  misc_feature (911)..(911): n is a, c, g, or t
  misc_feature (915)..(915): n is a, c, g, or t
  misc_feature (933)..(933): n is a, c, g, or t
  misc_feature (935)..(935): n is a, c, g, or t
  misc_feature (955)..(955): n is a, c, g, or t
  misc_feature (967)..(967): n is a, c, g, or t
  misc_feature (973)..(973): n is a, c, g, or t
  misc_feature (995)..(995): n is a, c, g, or t
  misc_feature (1009)..(1009): n is a, c, g, or t
  misc_feature (1011)..(1011): n is a, c, g, or t
  misc_feature (1017)..(1017): n is a, c, g, or t
  misc_feature (1026)..(1026): n is a, c, g, or t
  misc_feature (1031)..(1031): n is a, c, g, or t
  misc_feature (1039)..(1039): n is a, c, g, or t
  misc_feature (1045)..(1045): n is a, c, g, or t
  misc_feature (1049)..(1049): n is a, c, g, or t
  misc_feature (1053)..(1054): n is a, c, g, or t
  misc_feature (1057)..(1057): n is a, c, g, or t
  misc_feature (1060)..(1060): n is a, c, g, or t
  misc_feature (1065)..(1065): n is a, c, g, or t
  misc_feature (1067)..(1067): n is a, c, g, or t
  misc_feature (1074)..(1074): n is a, c, g, or t
  misc_feature (1091)..(1091): n is a, c, g, or t
  misc_feature (1109)..(1109): n is a, c, g, or t
  misc_feature (1111)..(1111): n is a, c, g, or t
  misc_feature (1117)..(1117): n is a, c, g, or t
  misc_feature (1125)..(1125): n is a, c, g, or t
  misc_feature (1129)..(1129): n is a, c, g, or t
  misc_feature (1150)..(1150): n is a, c, g, or t
  misc_feature (1156)..(1156): n is a, c, g, or t
  misc_feature (1159)..(1159): n is a, c, g, or t
  misc_feature (1166)..(1166): n is a, c, g, or t
  misc_feature (1184)..(1184): n is a, c, g, or t
  misc_feature (1187)..(1187): n is a, c, g, or t
  misc_feature (1197)..(1199): n is a, c, g, or t
  misc_feature (1212)..(1212): n is a, c, g, or t
  misc_feature (1214)..(1214): n is a, c, g, or t
  misc_feature (1216)..(1216): n is a, c, g, or t
  misc_feature (1225)..(1225): n is a, c, g, or t
  misc_feature (1238)..(1238): n is a, c, g, or t
gcgcagccgcgcggccactgcgagcccagccgcagcagccgggcaccaacgcttgagtgcacgctcggcgcccccgaggagagccacggcgagcccccaaagcccgcacgatgcaggccactgccgattccaccaagatggactgtgtgtggagcaactggaaaagtcaggctattgacctgttgtattggcgggacatcaagcagacgggcatcgtgtttgggagtttcctgctgctgctcttctccctgacccagttcagcgtggtgagcgtcgtggcctacctggccctggccgcactctcagccaccatcagtttccgcatctacaagtctgttttacaagcagtgcagaaaaccgacgaaggccaccctttcaaggcctacttggagcttgagatcaccctttctcaggagcagattcagaagtacacggactgcctgcagttctacgtgaacagcacacttaaggaactgaggaggctcttccttgtccaggacctggtggattccttaaaatttgcagtcctgatgtggctcctgacctacgttggcgctctcttcaatggcctgaccctgctgctcatggctgtggtttcaatgtttactctacctgtagtgtatgttaagcaccaggcacagattgaccaatatctgggacttgtgaggactcacataaatgctgttgtggcaaagattcaggctaaaatcccaggcgctaagangcacgctgagtaaactgatttcccaccggggactggacacaaaacaggaatgtctggagtggtaacagctctcttcttactcattactgcaaaattgattgtcttttcccccctccctccagtaccataatcttananaaaaaccttaaaacagctgttttaaggctgntccttgtactctnagnanattngagtcccttgtgtcaccncntaaagtataaaaaaaaatgnaataaaaggggntttttnaatttggggttgcaaaaaaaantgcatgatggtganancccaanttatctttnccctnttcggggntttttntttntttnnggnaangcttngnaacttcnaaagttccccggggctngccttttcttgccaaggncntgaagnaaaaaggnaaancccttaaaggccctgggttgngggtgnaanaactttnaaaaaaaaaaaaaatttnaanggagtttttnnnttttccacccccnantnaaaaaaaanccccccccccttn

SEQ ID NO: 262 - DNA, 1078 bp, Homo sapiens
  misc_feature (822)..(822): n is a, c, g, or t
  misc_feature (832)..(832): n is a, c, g, or t
  misc_feature (843)..(843): n is a, c, g, or t
  misc_feature (864)..(864): n is a, c, g, or t
  misc_feature (877)..(877): n is a, c, g, or t
  misc_feature (880)..(880): n is a, c, g, or t
  misc_feature (883)..(883): n is a, c, g, or t
  misc_feature (893)..(893): n is a, c, g, or t
  misc_feature (919)..(919): n is a, c, g, or t
  misc_feature (928)..(928): n is a, c, g, or t
  misc_feature (937)..(937): n is a, c, g, or t
  misc_feature (943)..(943): n is a, c, g, or t
  misc_feature (951)..(951): n is a, c, g, or t
  misc_feature (968)..(968): n is a, c, g, or t
  misc_feature (972)..(972): n is a, c, g, or t
  misc_feature (984)..(984): n is a, c, g, or t
  misc_feature (987)..(987): n is a, c, g, or t
  misc_feature (989)..(989): n is a, c, g, or t
  misc_feature (996)..(996): n is a, c, g, or t
  misc_feature (1010)..(1010): n is a, c, g, or t
  misc_feature (1019)..(1019): n is a, c, g, or t
  misc_feature (1022)..(1023): n is a, c, g, or t
  misc_feature (1026)..(1026): n is a, c, g, or t
  misc_feature (1040)..(1040): n is a, c, g, or t
  misc_feature (1042)..(1042): n is a, c, g, or t
  misc_feature (1051)..(1051): n is a, c, g, or t
  misc_feature (1054)..(1054): n is a, c, g, or t
  misc_feature (1060)..(1060): n is a, c, g, or t
  misc_feature (1065)..(1065): n is a, c, g, or t
  misc_feature (1068)..(1069): n is a, c, g, or t
  misc_feature (1072)..(1072): n is a, c, g, or t
gcgggaggaaagaagatggtgctggatctggatttgtttcgggtggataaaggaggggacccagccctcatccgagagacgcaggagaagcgcttcaaggacccgggactagtggaccagctggtgaaggcagacagcgagtggcgacgatgtagatttcgggcagacaacttgaacaagctgaagaacctatgcagcaagacaatcggagagaaaatgaagaaaaaagagccagtgggagatgatgagtctgtcccagagaatgtgctgagtttcgatgaccttactgcagacgctttagctaacctgaaagtctcacaaatcaaaaaagtccgactcctcattgatgaagccatcctgaagtgtgacgcggagcggataaagttggaagcagagcggtttgagaacctccgagagattgggaaccttctgcacccttctgtacccatcagtaacgatgaggatgtggacaacaaagtagagaggatttggggtgattgtacagtcaggaagaagtactctcatgtggacctggtggtgatggtagatggctttgaaggcgaaaagggggccgtggtggctgggagtcgagggtacttcttgaagggggtcctggtgttcctggaacaggctctcatccagtatgcccttcgcaccttgggaagtcggggctacattcccatttataccccctttttcatgaggaaggaggtcatgcaggaggtggcacagctcagccagtttgatgaagaactttataaggtgattggcaaaggcagtgaaaagtctgatgacaactcctatgatgagaagtacctgatngccacctcanagcagcccatngctgccctgcaccgggatgantggctccggccgnagnacntgcccatcangtatgctggcctgtctacctgcttcnttaggaggngggctcccnggccgngaccccgnggcatcttccgagtccntcantttgaaaaaatngancngtttggntactcctccccccngaacaccantcnnggnaaatttttaaaaantnattaccccnccnaaaaanttctnccnnccnggggat

SEQ ID NO: 263 - DNA, 848 bp, Homo sapiens
  misc_feature (334)..(334): n is a, c, g, or t
  misc_feature (536)..(536): n is a, c, g, or t
  misc_feature (584)..(584): n is a, c, g, or t
  misc_feature (591)..(591): n is a, c, g, or t
  misc_feature (640)..(640): n is a, c, g, or t
  misc_feature (672)..(672): n is a, c, g, or t
  misc_feature (709)..(709): n is a, c, g, or t
  misc_feature (711)..(711): n is a, c, g, or t
  misc_feature (746)..(746): n is a, c, g, or t
  misc_feature (760)..(760): n is a, c, g, or t
  misc_feature (774)..(774): n is a, c, g, or t
  misc_feature (778)..(778): n is a, c, g, or t
  misc_feature (786)..(786): n is a, c, g, or t
  misc_feature (794)..(794): n is a, c, g, or t
  misc_feature (797)..(797): n is a, c, g, or t
  misc_feature (801)..(802): n is a, c, g, or t
  misc_feature (804)..(804): n is a, c, g, or t
  misc_feature (809)..(809): n is a, c, g, or t
  misc_feature (812)..(814): n is a, c, g, or t
  misc_feature (822)..(822): n is a, c, g, or t
  misc_feature (841)..(841): n is a, c, g, or t
  misc_feature (843)..(843): n is a, c, g, or t
  misc_feature (848)..(848): n is a, c, g, or t
gcaggaagaacgcgagcgtacgggagaatctgggccggcggggcgcagcgagccgcatcgcagctggaggacagccggggtgtgtctgtgtgtgtttgcccgtcggttgaaggccccatcgcccccgggtccccgccctgccccagaaagcgttccccaagagagctaggagtcctgcgcacctggagcgcgctccgcgtccacgcccagagggcgctgcacactcgcgcccgaggactgcctgccccccttcagcccctctcccgggctgcgcctccgcactccgggcccgggcagaagggggtgcgcctcggccccaccacccagggagcanccgagctgaaaggccgggaaccgcggcttgcggggaccacagctcccgaaagcgacgttcggccaccggaggagcgggagccaagcagcaaattgtggctactaatttgccccctgaagatcaagatggctctggggatgactctgacaacttctccggctcaggtgcaggtgctttgcaagatatcaccttgtcacagcanaccccctccacttggaaggacacgcagctcctgacggctattcccacntctccanaacccaccggcctggaggctacagctgcctccacctccaacctgccggntggagaggggcccaaggagggagaggctgtantcctgccaaaaatggagcctggcctcaccgcccaggnancaggaggccaaccccccgacccaaggaaaacacanagcttcccgaaccnttcattaaggcctnaacnaacaaaanccaacaanggnccannanccccnccnnncttccaancccccaaaagggaacatgnancctgn

SEQ ID NO: 264 - DNA, 202 bp, Homo sapiens
gcggacgcgtgggcgtggtttcatcatatctctttgcataccccatgtcttccccagttgtcccctggagtttggggggacatcccgcctcaggcatccttctcaaggggaagccaagagaggcatcaggatgggtgggtttctgattgtggcaacgtttgcaaccgttcacgattcaataaatattggatgaatttaaccg

SEQ ID NO: 265 - DNA, 1145 bp, Homo sapiens
  misc_feature (710)..(710): n is a, c, g, or t
  misc_feature (731)..(731): n is a, c, g, or t
  misc_feature (737)..(737): n is a, c, g, or t
  misc_feature (740)..(740): n is a, c, g, or t
  misc_feature (791)..(791): n is a, c, g, or t
  misc_feature (822)..(822): n is a, c, g, or t
  misc_feature (833)..(833): n is a, c, g, or t
  misc_feature (842)..(842): n is a, c, g, or t
  misc_feature (849)..(849): n is a, c, g, or t
  misc_feature (859)..(859): n is a, c, g, or t
  misc_feature (882)..(882): n is a, c, g, or t
  misc_feature (887)..(887): n is a, c, g, or t
  misc_feature (909)..(909): n is a, c, g, or t
  misc_feature (913)..(913): n is a, c, g, or t
  misc_feature (915)..(915): n is a, c, g, or t
  misc_feature (956)..(957): n is a, c, g, or t
  misc_feature (960)..(960): n is a, c, g, or t
  misc_feature (963)..(963): n is a, c, g, or t
  misc_feature (975)..(975): n is a, c, g, or t
  misc_feature (978)..(979): n is a, c, g, or t
  misc_feature (992)..(992): n is a, c, g, or t
  misc_feature (996)..(997): n is a, c, g, or t
  misc_feature (1001)..(1001): n is a, c, g, or t
  misc_feature (1008)..(1008): n is a, c, g, or t
  misc_feature (1028)..(1029): n is a, c, g, or t
  misc_feature (1040)..(1040): n is a, c, g, or t
  misc_feature (1042)..(1043): n is a, c, g, or t
  misc_feature (1057)..(1057): n is a, c, g, or t
  misc_feature (1067)..(1067): n is a, c, g, or t
  misc_feature (1074)..(1074): n is a, c, g, or t
  misc_feature (1084)..(1084): n is a, c, g, or t
  misc_feature (1090)..(1090): n is a, c, g, or t
  misc_feature (1092)..(1092): n is a, c, g, or t
  misc_feature (1098)..(1098): n is a, c, g, or t
  misc_feature (1100)..(1100): n is a, c, g, or t
  misc_feature (1105)..(1105): n is a, c, g, or t
  misc_feature (1107)..(1108): n is a, c, g, or t
  misc_feature (1111)..(1112): n is a, c, g, or t
  misc_feature (1129)..(1129): n is a, c, g, or t
gggggccgcgggagacgtggtgccgctgcgggctcgctctgccgtgcgctaggcttggtgggaaggcctgttctcgagtccgcgcttttcgtcaccgccatgtcgggaggtggtgtgattcgtggccccgcagggaacaacgattgccgcatctacgtgggtaacttacctccagacatccgaaccaaggacattgaggacgtgttctacaaatacggcgctatccgcgacatcgacctcaagaatcgccgcgggggaccgcccttcgccttcgttgagttcgaggacccgcgagacgcggaagacgcggtgtatggtcgcgacggctatgattacgatgggtaccgtctgcgggtggagtttcctcgaagcggccgtggaacaggccgaggcggcggcgggggtggaggtggcggagctccccgaggtcgctatggccccccatccaggcggtctgaaaacagagtggttgtctctggactgcctccaagtggaagttggcaggatttaaaggatcacatgcgtgaagcaggtgatgtatgttatgctgatgtttaccgagatggcactggtgtcgtggagtttgtacggaaagaagatatgacctatgcagttcgaaaactggataacactaagtttagatctcatgagggagaaactgcctacatccgggttaaagttgatgggcccagaagtccaagttatggaanatctcgatctcgaagccgtantcgtancanaagccgtagcagaagcaacagcaggagtcgcagttactccccaaggagaancagaggatcaccacgctattctccccgtcanaacaaatctcnctctcgtanataaaangattggtganctttttttaaaaccatgttgtanacaanttttcctttattcaaaaaatcntttncnttttttaattcaaactgttttttttcaaaatggcctaaagnnttnaanttgcattcttgnaannatccccttgcccnaaanncaanattcccnttcgggctttgaaaaaattnnattttaagggnannccaaaaacggaatntttaaaattnattaacncccaaccctncaaaangnaaaatngnaaatntnnatnnccccgtttttggtaacntgaaatttgggggttt

SEQ ID NO: 266 - DNA, 1091 bp, Homo sapiens
  misc_feature (209)..(209): n is a, c, g, or t
  misc_feature (473)..(473): n is a, c, g, or t
  misc_feature (697)..(697): n is a, c, g, or t
  misc_feature (753)..(753): n is a, c, g, or t
  misc_feature (763)..(763): n is a, c, g, or t
  misc_feature (787)..(787): n is a, c, g, or t
  misc_feature (834)..(834): n is a, c, g, or t
  misc_feature (853)..(853): n is a, c, g, or t
  misc_feature (863)..(863): n is a, c, g, or t
  misc_feature (877)..(877): n is a, c, g, or t
  misc_feature (891)..(891): n is a, c, g, or t
  misc_feature (910)..(910): n is a, c, g, or t
  misc_feature (927)..(927): n is a, c, g, or t
  misc_feature (936)..(936): n is a, c, g, or t
  misc_feature (938)..(938): n is a, c, g, or t
  misc_feature (976)..(976): n is a, c, g, or t
  misc_feature (992)..(992): n is a, c, g, or t
  misc_feature (1023)..(1023): n is a, c, g, or t
  misc_feature (1027)..(1027): n is a, c, g, or t
  misc_feature (1036)..(1036): n is a, c, g, or t
  misc_feature (1043)..(1043): n is a, c, g, or t
  misc_feature (1056)..(1056): n is a, c, g, or t
  misc_feature (1062)..(1063): n is a, c, g, or t
  misc_feature (1069)..(1069): n is a, c, g, or t
  misc_feature (1071)..(1071): n is a, c, g, or t
  misc_feature (1077)..(1077): n is a, c, g, or t
  misc_feature (1079)..(1079): n is a, c, g, or t
  misc_feature (1082)..(1082): n is a, c, g, or t
gcgggactcttggcgggtgaaggtgtgtgtcagcttttgcgtcactcgagccctgggcgctgcttgctaaagagccgagcacgcgggtctgtcatcatgtcgcgttacgggcggtacggaggagaaaccaaggtgtatgttggtaacctgggaactggcgctggcaaaggagagttagaaagggctttcagttattatggtcctttaanaactgtatggattgcgagaaatcctccaggatttgcctttgtggaattcgaagatcctagagatgcagaagatgcagtacgaggactggatggaaaggtgatttgtggctcccgagtgagggttgaactatcgacaggcatgcctcggagatcacgttttgatagaccacctgcccgacgtccctttgatccaaatgatagatgctatgagtgtggcgaaaagggacattatgcttatgattgtcatcgttacagccggcgaanaagaagcaggtatttattttaataaaggaatggttggtattctagttaatcaagtaattcttttattagcaaggcagaaactagtgtttttctataaacttgaatgttaattgtacaggtgtattttacaatttttgtttaattaaaaaaatgttactatattaataatcaacctggtcaaaacctttcaggtttcttcgtttgagtcagtcgccttgattcanaatgtcacgagccttatgatatcatgctgaggcgccttgcaaatccgacaattaanatcctcctanaccttgaggtgatcagcataaaangccaaatcccctcgagtcatctacacctagcttcaccttattctttnaaagggcaaaaaatttganacggtgatcnccgtaacagtaaantttggcttacaatnggggccccccctccggttnaaaaaaaagaaccccanaattgaccncntttcccactaaaaaatcttcttgcgtcaatcaagcccnccctggctcatttggntgtcatttgatccccccttaaattgaaaaancctnctaatgccncgatcgnctaaaaaacctcnaaatcnncaaatncncaaacnanggnccaaaaagg

SEQ ID NO: 267 - DNA, 1002 bp, Homo sapiens
  misc_feature (117)..(117): n is a, c, g, or t
  misc_feature (717)..(717): n is a, c, g, or t
  misc_feature (725)..(725): n is a, c, g, or t
  misc_feature (761)..(761): n is a, c, g, or t
  misc_feature (782)..(782): n is a, c, g, or t
  misc_feature (791)..(791): n is a, c, g, or t
  misc_feature (800)..(800): n is a, c, g, or t
  misc_feature (812)..(812): n is a, c, g, or t
  misc_feature (826)..(827): n is a, c, g, or t
  misc_feature (840)..(840): n is a, c, g, or t
  misc_feature (848)..(848): n is a, c, g, or t
  misc_feature (862)..(862): n is a, c, g, or t
  misc_feature (866)..(866): n is a, c, g, or t
  misc_feature (868)..(868): n is a, c, g, or t
  misc_feature (875)..(875): n is a, c, g, or t
  misc_feature (887)..(887): n is a, c, g, or t
  misc_feature (889)..(890): n is a, c, g, or t
  misc_feature (905)..(905): n is a, c, g, or t
  misc_feature (910)..(910): n is a, c, g, or t
  misc_feature (912)..(912): n is a, c, g, or t
  misc_feature (914)..(914): n is a, c, g, or t
  misc_feature (924)..(924): n is a, c, g, or t
  misc_feature (926)..(926): n is a, c, g, or t
  misc_feature (929)..(929): n is a, c, g, or t
  misc_feature (934)..(934): n is a, c, g, or t
  misc_feature (937)..(937): n is a, c, g, or t
  misc_feature (939)..(939): n is a, c, g, or t
  misc_feature (946)..(946): n is a, c, g, or t
  misc_feature (953)..(953): n is a, c, g, or t
  misc_feature (955)..(955): n is a, c, g, or t
  misc_feature (960)..(960): n is a, c, g, or t
  misc_feature (970)..(970): n is a, c, g, or t
  misc_feature (975)..(975): n is a, c, g, or t
  misc_feature (982)..(982): n is a, c, g, or t
  misc_feature (986)..(986): n is a, c, g, or t
  misc_feature (989)..(989): n is a, c, g, or t
  misc_feature (993)..(994): n is a, c, g, or t
  misc_feature (999)..(999): n is a, c, g, or t
gcccacgcgtccgcccacgcgtccgcccacgcgtccgcggcagcggcggcggcggctgcagaacagcaaagttccaatggtcctgtaaagaagtccatgcgtgagaaggctgttganagaaggagtgtcaataaagagcacaacagtaactttaaagctggatacattccgattgatgaagatcgtctccacaaaacagggttgagaggaagaaagggcaatttagccatctgtgtgattatcctcttgtttatcctggctgtcatcaatttaataataacacttgttatttgggccgtgattcgcattggaccaaatggctgtgatagtatggagtttcatgaaagtggcctgcttcgatttaagcaagtatctgacatgggagtgatccaccctctttataaaagcacagtaggaggaaggcgaaatgaaaatttggtcatcactggcaacaaccagcctattgtttttcagcaagggacaacaaagctcagtgtagaaaacaacaaaacttctattacaagtgacatcggcatgcagttttttgacccgaggactcaaaatatcttattcagcacagactatgaaactcatgagtttcatttgccaagtggagtgaaaagtttgaatgttcaaaaggcatctactgaaagggattaccagcaatgctaccagtgatttaaatataaaagttgatgggcgtgctattgtgcgtgnaaatgaangtgtattcattatgggcaaaaaccatttgaatttcncatggggtgggtaatatgggngttaaaggncggaaaaanagtatcatcccnaaatgggatcctgnngaagggtcaaccnccaccccncctacccagtttcntccnantggaaanccatttggggtnanngggggacctgggtanccctncnanctctgcatgngnggntgatnggnanccccttnccaaggngnaaggnaacccacccnaaaanatgggcngccnaanttcnnaaaanacc

SEQ ID NO: 268 - DNA, 1147 bp, Homo sapiens
  misc_feature (852)..(852): n is a, c, g, or t
  misc_feature (892)..(892): n is a, c, g, or t
  misc_feature (897)..(897): n is a, c, g, or t
  misc_feature (923)..(923): n is a, c, g, or t
  misc_feature (926)..(926): n is a, c, g, or t
  misc_feature (948)..(948): n is a, c, g, or t
  misc_feature (974)..(974): n is a, c, g, or t
  misc_feature (978)..(978): n is a, c, g, or t
  misc_feature (986)..(986): n is a, c, g, or t
  misc_feature (989)..(989): n is a, c, g, or t
  misc_feature (996)..(996): n is a, c, g, or t
  misc_feature (1009)..(1009): n is a, c, g, or t
  misc_feature (1012)..(1012): n is a, c, g, or t
  misc_feature (1026)..(1026): n is a, c, g, or t
  misc_feature (1031)..(1031): n is a, c, g, or t
  misc_feature (1033)..(1033): n is a, c, g, or t
  misc_feature (1035)..(1035): n is a, c, g, or t
  misc_feature (1044)..(1044): n is a, c, g, or t
  misc_feature (1046)..(1047): n is a, c, g, or t
  misc_feature (1052)..(1052): n is a, c, g, or t
  misc_feature (1058)..(1059): n is a, c, g, or t
  misc_feature (1070)..(1071): n is a, c, g, or t
  misc_feature (1073)..(1073): n is a, c, g, or t
  misc_feature (1097)..(1097): n is a, c, g, or t
  misc_feature (1101)..(1101): n is a, c, g, or t
  misc_feature (1104)..(1105): n is a, c, g, or t
  misc_feature (1113)..(1113): n is a, c, g, or t
  misc_feature (1118)..(1118): n is a, c, g, or t
  misc_feature (1123)..(1123): n is a, c, g, or t
  misc_feature (1133)..(1133): n is a, c, g, or t
ggttccatccccaaggcggccgtcaggtttggaatgttcgagttcctcagcaaccacatgcgggatgcccagggacggctggacagcacgcgtgggctgctgtgcggcctgggcgctggcgtggccgaggccgtggtggtcgtgtgccccatggagaccatcaaggtgaagttcatccacgaccagacctccccaaaccccaagtacagaggattcttccacggggttagggagattgtgcgggaacaagggctgaaggggacgtaccagggcctcacagccactgtcctgaagcagggctcgaaccaggccatccgcttcttcgtcatgacctccctgcgcaactggtaccgaggggacaaccccaacaagcccatgaaccctctgatcactggggtcttcggagctattgcaggcgcagccagtgtctttggaaacactcctctggatgtgattaagacccggatggcctggaggcgcacaaataccggaacacgtgggactgcggcttgcagatcctgaagaaggaggggctcaaggcattctacaagggcactgtcccccgcctgggccgggtctgcctggatgtggccatagtgtttgtcatctatgatgaagtggtgaagctgctcaacaaagtgtggaagacggactaagcctagagaggccgcaaggggaccgccccaggcaccgccagagtgtcctgctacctttgtctcacgattccagtgcagtagtgccaaaaggccccttcccacgtccctcgagctctgtagcctggtctgtgcattgtggctgtcaaatccatgtgtccccccctgtggtctgtgtgtgaaaccaccactgtgtccnagtgtctggcccaacccatgggctggatgtgcaatctggncctangaaccctgtgcctgtgtttcatgttntgngtcacgtgaaccttgtgccccnccctcccggggtgcccgtgtggcctnggtnctcggccntgnaaccctnggccgggtcccantcnggggccttccaccntgccntngnctaaaaaantnncttcngggccnnggcttggtttnncnatttcaaggggttgaaccccctgntttnccnnaattggcntaaanggccnccggcccctntcccccccgaaagg

SEQ ID NO: 269 - DNA, 1209 bp, Homo sapiens
  misc_feature (764)..(764): n is a, c, g, or t
  misc_feature (843)..(843): n is a, c, g, or t
  misc_feature (845)..(845): n is a, c, g, or t
  misc_feature (854)..(854): n is a, c, g, or t
  misc_feature (875)..(875): n is a, c, g, or t
  misc_feature (904)..(904): n is a, c, g, or t
  misc_feature (910)..(910): n is a, c, g, or t
  misc_feature (925)..(925): n is a, c, g, or t
  misc_feature (943)..(943): n is a, c, g, or t
  misc_feature (946)..(946): n is a, c, g, or t
  misc_feature (964)..(965): n is a, c, g, or t
  misc_feature (974)..(974): n is a, c, g, or t
  misc_feature (976)..(976): n is a, c, g, or t
  misc_feature (998)..(998): n is a, c, g, or t
  misc_feature (1000)..(1000): n is a, c, g, or t
  misc_feature (1011)..(1011): n is a, c, g, or t
  misc_feature (1013)..(1013): n is a, c, g, or t
  misc_feature (1016)..(1016): n is a, c, g, or t
  misc_feature (1027)..(1027): n is a, c, g, or t
  misc_feature (1029)..(1029): n is a, c, g, or t
  misc_feature (1037)..(1038): n is a, c, g, or t
  misc_feature (1044)..(1044): n is a, c, g, or t
  misc_feature (1054)..(1054): n is a, c, g, or t
  misc_feature (1059)..(1059): n is a, c, g, or t
  misc_feature (1061)..(1062): n is a, c, g, or t
  misc_feature (1084)..(1085): n is a, c, g, or t
  misc_feature (1098)..(1099): n is a, c, g, or t
  misc_feature (1101)..(1101): n is a, c, g, or t
  misc_feature (1107)..(1107): n is a, c, g, or t
  misc_feature (1117)..(1117): n is a, c, g, or t
  misc_feature (1120)..(1120): n is a, c, g, or t
  misc_feature (1122)..(1122): n is a, c, g, or t
  misc_feature (1126)..(1126): n is a, c, g, or t
  misc_feature (1159)..(1159): n is a, c, g, or t
  misc_feature (1170)..(1171): n is a, c, g, or t
  misc_feature (1173)..(1173): n is a, c, g, or t
  misc_feature (1177)..(1177): n is a, c, g, or t
  misc_feature (1182)..(1182): n is a, c, g, or t
  misc_feature (1186)..(1187): n is a, c, g, or t
  misc_feature (1198)..(1198): n is a, c, g, or t
  misc_feature (1205)..(1205): n is a, c, g, or t
ggacaagcagtcagcgcttatggtcaatggtgtcctcaaacagtaccagatcaaaggtttggagtggctggtgtccctgtacaacaacaacctgaacggcatcctggccgacgagatgggcctggggaagaccatccagaccatcgcgctcatcacgtacctcatggagcacaaacgcatcaatgggcccttcctcatcatcgtgcctctctcaacgctgtccaactgggcgtacgagtttgacaagtgggccccctccgtggtgaaggtgtcttacaagggatccccagcagcaagacgggcctttgtcccccagctccggagtgggaagttcaacgtcttgctgacgacgtacgagtacatcatcaaagacaagcacatcctcgccaagatccgttggaagtacatgattgtggacgaaggtcaccgcatgaagaaccaccactgcaagctgacgcaggtgctcaacacgcactatgtggcaccccgccgcctgctgctgacgggcacaccgctgcagaacaagcttcccgagctctgggcgctgctcaacttcctgctgcccaccatcttcaagagctgcagcaccttcgagcagtggtttaacgcaccctttgccatgaccggggaaaaggtggacctgaatgaggaggaaaccattctcatcatccggcgtctccacaaagtgctgcggcccttcttgctccgacgactcaagaaggaagtcgaggcccagttgcccgaaaaggtggagtacgtcatcnaagtgcgacatgtctgcgctgcagcgagtgctctaccgccacatgcaggccaagggcgtgctgctgactgatggctccnanaaggacaanaagggcaaaggcggcaccaanaccctgatgaacaccatcatgcactgcgnaaaatntgcaaccacccctantgttcagcaatcgaggantcnttttcgaacacttgggtnnctggcggcntntcaagggctggacctgtacgancncgggtaaattnanctnttgaaaaattntnccaaatcnnaaaacnaacaaaagtncggtntnngccaaagacctcccctgaacanntggaaaatatttnngntcgggnttaaaacccnggntngggnaaccaaagggggaaacggggtttttttaaaacnttaaaacccgnntnaaanttttntttnnctaacccgggnggggggngccg

SEQ ID NO: 270 - DNA, 792 bp, Homo sapiens
  misc_feature (626)..(626): n is a, c, g, or t
  misc_feature (634)..(634): n is a, c, g, or t
  misc_feature (666)..(666): n is a, c, g, or t
  misc_feature (677)..(677): n is a, c, g, or t
  misc_feature (682)..(682): n is a, c, g, or t
  misc_feature (684)..(684): n is a, c, g, or t
  misc_feature (698)..(698): n is a, c, g, or t
  misc_feature (701)..(701): n is a, c, g, or t
  misc_feature (704)..(704): n is a, c, g, or t
  misc_feature (711)..(711): n is a, c, g, or t
  misc_feature (722)..(722): n is a, c, g, or t
  misc_feature (727)..(727): n is a, c, g, or t
  misc_feature (741)..(741): n is a, c, g, or t
  misc_feature (749)..(749): n is a, c, g, or t
  misc_feature (755)..(757): n is a, c, g, or t
  misc_feature (760)..(760): n is a, c, g, or t
  misc_feature (762)..(762): n is a, c, g, or t
  misc_feature (765)..(765): n is a, c, g, or t
  misc_feature (770)..(770): n is a, c, g, or t
  misc_feature (772)..(773): n is a, c, g, or t
  misc_feature (775)..(775): n is a, c, g, or t
  misc_feature (778)..(779): n is a, c, g, or t
gaaatcctctgtgacgatctggatttgaacccgctgacgtttgtgccagccatcgcctctgccatcagacagcagatcgagtcctaccccacggacagcatcctggaggaccagtcagaccagcgcgtcatcatcaagctgaacatccatgtgggaaacatttccctggtggaccagtttgagtgggacatgtcagagaaggagaactcaccagagaagtttgccctgaagctgtgctcggagctggggttgggcggggagtttgtcaccaccatcgcatacagcatccggggacagctgagctggcatcagaagacctacgccttcagcgagaaccctctgcccacagtggagattgccatccggaacacgggcgatgcggaccagtggtgcccactgctggagactctgacagacgctgagatggagaagaagatccgcgaccaggacaggaacacgaggcggatgaggcgtcttgccaacacggccccggcctggtaaccagcccatcagcacacggctcccacggagcatctcagaagattgggccgcctctcctccatcttctggcaaggacagaggcgaggggacagcccagcgccatcctgaggatcgggtgggggtgnagtgttgncttccaggtggaccttcccggcacacattctnttttgttgagncccantntgccccctatcctnttntcnctaaccnttcctattctntgggngtcaaagaaaaaanccttattntaagcnnntgntnttnttttnannanaannaaccccccttcag

SEQ ID NO: 271 - DNA, 1152 bp, Homo sapiens
  misc_feature (691)..(691): n is a, c, g, or t
  misc_feature (802)..(802): n is a, c, g, or t
  misc_feature (811)..(811): n is a, c, g, or t
  misc_feature (839)..(839): n is a, c, g, or t
  misc_feature (879)..(879): n is a, c, g, or t
  misc_feature (886)..(886): n is a, c, g, or t
  misc_feature (890)..(890): n is a, c, g, or t
  misc_feature (902)..(902): n is a, c, g, or t
  misc_feature (919)..(919): n is a, c, g, or t
  misc_feature (928)..(928): n is a, c, g, or t
  misc_feature (930)..(930): n is a, c, g, or t
  misc_feature (934)..(934): n is a, c, g, or t
  misc_feature (947)..(947): n is a, c, g, or t
  misc_feature (965)..(965): n is a, c, g, or t
  misc_feature (982)..(982): n is a, c, g, or t
  misc_feature (994)..(995): n is a, c, g, or t
  misc_feature (998)..(998): n is a, c, g, or t
  misc_feature (1002)..(1002): n is a, c, g, or t
  misc_feature (1005)..(1005): n is a, c, g, or t
  misc_feature (1016)..(1016): n is a, c, g, or t
  misc_feature (1018)..(1019): n is a, c, g, or t
  misc_feature (1029)..(1029): n is a, c, g, or t
  misc_feature (1032)..(1032): n is a, c, g, or t
  misc_feature (1050)..(1050): n is a, c, g, or t
  misc_feature (1052)..(1052): n is a, c, g, or t
  misc_feature (1063)..(1063): n is a, c, g, or t
  misc_feature (1069)..(1069): n is a, c, g, or t
  misc_feature (1083)..(1083): n is a, c, g, or t
  misc_feature (1086)..(1086): n is a, c, g, or t
  misc_feature (1091)..(1092): n is a, c, g, or t
  misc_feature (1101)..(1101): n is a, c, g, or t
  misc_feature (1104)..(1104): n is a, c, g, or t
  misc_feature (1112)..(1112): n is a, c, g, or t
  misc_feature (1121)..(1121): n is a, c, g, or t
  misc_feature (1128)..(1131): n is a, c, g, or t
  misc_feature (1136)..(1136): n is a, c, g, or t
  misc_feature (1138)..(1138): n is a, c, g, or t
ggtgcgtgcgggccgcggcagccgaacaaaggagcaggggcgccgccgcagggacccgccacccacctcccggggccgcgcagcggcctctcgtctactgccaccatgaccgccaacggcacagccgaggcggtgcagatccagttcggcctcatcaactgcggcaacaagtacctgacggccgaggcgttcgggttcaaggtgaacgcgtccgccagcagcctgaagaagaagcagatctggacgctggagcagccccctgacgaggcgggcagcgcggccgtgtgcctgcgcagccacctgggccgctacctggcggcggacaaggacggcaacgtgacctgcgagcgcgaggtgcccggtcccgactgccgtttcctcatcgtggcgcacgacgacggtcgctggtcgctgcagtccgaggcgcaccggcgctacttcggcggcaccgaggaccgcctgtcctgcttcgcgcagacggtgtcccccgccgagaagtggagcgtgcacatcgccatgcaccctcaggtcaacatctacagcgtcacccgtaagcgctacgcgcacctgagcgcgcggccggccgacgagatcgccgtggaccgcgacgtgccctggggcgtcgactcgctcatcaccctcgccttccaggaccagcgctacagcgtgcagaccgccgaccaccgcttcntgcgccacgacgggcgcctggtggcgcgccccgagccggccactggctacacgctggagttccgctccggcaaggtggccttccgcgactgcgagggccgttacctggcgncgtcggggnccagcggcacgctcaaggcgggcaaggncaccaaggtgggcaaggacgaactctttgctctggaacanaactgcnccangtcgtgctgcangcggccaacaaaagaangtgtccacncnccanggtatggactgtntgccattcagaacaaganaccgaccagaaaacttnccactggaaatnnacnccanacnaaaaatgtgcntnnttaccccacnggnaaatattgaaccttaagncnccgggggggtnaattcncccctcccaaaaangcnccttnntttttaatnaangggggacnggcccaaanttagggnnnnatggnanttttttttcccaaa

SEQ ID NO: 272 - DNA, 1065 bp, Homo sapiens
  misc_feature (765)..(765): n is a, c, g, or t
  misc_feature (768)..(768): n is a, c, g, or t
  misc_feature (816)..(816): n is a, c, g, or t
  misc_feature (824)..(824): n is a, c, g, or t
  misc_feature (837)..(837): n is a, c, g, or t
  misc_feature (884)..(884): n is a, c, g, or t
  misc_feature (887)..(887): n is a, c, g, or t
  misc_feature (891)..(891): n is a, c, g, or t
  misc_feature (896)..(896): n is a, c, g, or t
  misc_feature (899)..(899): n is a, c, g, or t
  misc_feature (901)..(901): n is a, c, g, or t
  misc_feature (904)..(904): n is a, c, g, or t
  misc_feature (927)..(927): n is a, c, g, or t
  misc_feature (929)..(929): n is a, c, g, or t
  misc_feature (945)..(945): n is a, c, g, or t
  misc_feature (958)..(958): n is a, c, g, or t
  misc_feature (960)..(960): n is a, c, g, or t
  misc_feature (962)..(962): n is a, c, g, or t
  misc_feature (965)..(965): n is a, c, g, or t
  misc_feature (971)..(971): n is a, c, g, or t
  misc_feature (975)..(975): n is a, c, g, or t
  misc_feature (993)..(993): n is a, c, g, or t
  misc_feature (1011)..(1011): n is a, c, g, or t
  misc_feature (1018)..(1018): n is a, c, g, or t
  misc_feature (1020)..(1020): n is a, c, g, or t
  misc_feature (1028)..(1028): n is a, c, g, or t
  misc_feature (1043)..(1043): n is a, c, g, or t
  misc_feature (1048)..(1048): n is a, c, g, or t
  misc_feature (1057)..(1057): n is a, c, g, or t
  misc_feature (1061)..(1061): n is a, c, g, or t
  misc_feature (1063)..(1063): n is a, c, g, or t
gggacagagcttaaaatgtgggaccctcacaatgatcccaatgctcagggggatgccttcaagactctcttcgtggcgagagtgaattatgacacaacagaatccaagctccggagagagtttgaggtgtacggacctatcaaaagaatacacatggtctacagtaagcggtcaggaaagccccgtggctatgccttcatcgagtacgaacacgagcgagacatgcactccgcttacaaacacgcagatggcaagaagattgatggcaggagggtccttgtggacgtggagaggggccgaaccgtgaagggctggaggccccggcggctaggaggaggcctcggtggtaccagaagaggaggggctgatgtgaacatccggcattcaggccgcgatgacacctcccgctacgatgagagggaccgggaccgggaccgtgagcgggagcgcagagagcggagccgggagcgagacaaggagcgagaacggcgacgctcccgctcccgggaccggcggaggcgctcacggagtcgcgacaaggaggagcggaggcgctccagggagcggagcaaggacaaggaccgggaccggaagcggcgaagcagccggagtcgggagcgggcccggcgggagcgggagcgcaaggaggagctgcgtggtggcggtggcgacatggcggagccctccgaggcgggtgacgcgccccctgatgatgggcctccaggggagctcgggcctgacggccctgacggtccagaggaaaanggnccgggatcgtgaccggggagcgacggcggaaccaccggaacgagcgcnaaccggcncccgggacccggnatcgtgaccgtgaccgtgaccgcgagcacaaacggggggaaccgggncantgancgggncangnatnaagccccaaggtgggggcggtgncnagaaaacgggctgganggtctgggcaacnananccnaaaatntacntggaatctgagggcggcnacggctacctggctccgnaaatggntnttttatgnagctcccccgaaatnaaaangtccccccncccntntg

SEQ ID NO: 273 - DNA, 886 bp, Homo sapiens
  misc_feature (805)..(805): n is a, c, g, or t
  misc_feature (823)..(823): n is a, c, g, or t
  misc_feature (827)..(827): n is a, c, g, or t
  misc_feature (834)..(834): n is a, c, g, or t
  misc_feature (867)..(867): n is a, c, g, or t
  misc_feature (874)..(876): n is a, c, g, or t
  misc_feature (878)..(878): n is a, c, g, or t
  misc_feature (880)..(880): n is a, c, g, or t
  misc_feature (882)..(882): n is a, c, g, or t
  misc_feature (885)..(885): n is a, c, g, or t
gatttgatcctctgtgactgtgatgagttcagaaagatcaagccaaagaactccaaacaagcagaaagggaagagaagcgagtcctcggtctggtgctgctgcgaggggagaatctggtctcaatgacagtagagggacctcctcccaaagatactggtattgctcgagttccacttgctggagctgccgggggcccagggatcggcagggctgctggcagaggaatcccagctggggttcccatgccccaggctcctgcaggacttgctgggccagtccgtggggttggcgggccatcccaacaggtgatgaccccacaaggaagaggtactgttgcagccgctgcagctgctgccacagccagtattgccggggctccaacccagtacccacctggccgtgggggtcctcccccacctatgggccgaggagcaccccctccaggcatgatgggcccacctcctggtatgagacctcctatgggtcccccaatggggatcccccctggaagagggactccaatgggcatgccccctccgggaatgcggcctcctccccctgggatgcgaggccttctttgacccttggccacagagtatggaagtagctccgcagaggcgtgggctcgattcctcagggccacgttaccacagacctgtttgtttcttatgctgttgttcgtggagtctcatgggattgtctggttttcccttacagggccccctcccccgggaatgcgcccaccaaggccctaaactcatcttggccctcctcaactccctgcctgtttcccgtaagctgtanataatcctttttatctcntgtngcctatnaaactggtttaaaaaaaaactccttaaaaaaancttttannnanananaana

SEQ ID NO: 274 - DNA, 764 bp, Homo sapiens
  misc_feature (645)..(645): n is a, c, g, or t
  misc_feature (675)..(675): n is a, c, g, or t
  misc_feature (683)..(683): n is a, c, g, or t
  misc_feature (715)..(715): n is a, c, g, or t
  misc_feature (721)..(721): n is a, c, g, or t
  misc_feature (742)..(742): n is a, c, g, or t
  misc_feature (750)..(750): n is a, c, g, or t
  misc_feature (758)..(758): n is a, c, g, or t
  misc_feature (764)..(764): n is a, c, g, or t
gcacgtaacggagtggccaacggcctgcagagcaacatgcccaagttttattgtgactactgcgatacatacctcacccatgactctccatctgtgagaaagacacactgcagtggaaggaaacacaaagagaatgtgaaagactattatcagaaatggatggaagagcaggctcagagcctgattgacaaaacaacggctgcatttcaacaaggaaagatacctcctactccattctctgctcctcctcctgcaggggcgatgataccacctccccccagccttccgggtcctcctcgccctggtatgatgccagcaccccatatggggggccctcccatgatgccaatgatgggccctcctcctcctgggatgatgccagtgggacctgctcctggaatgaggccgcccatgggaggccatatgccaatgatgcctgggcccccaatgatgagacctcctgcccgtcccatgatggtgcccactcggcccggaatgactcgaccagacagataaggatagaggggaggccttattgtatcggttttatattacctgttctgcttcaccaggagatcatgctgctgtgatactgagttttctaaacagcataaggaagacttgctcccctgtcctatgaaaganaatagtttttggaaggggagaagttgggancaaaaaanatgcaatttttccctttgtattgggaaaatgngaaaanaaaatttgtcaaactcttttncagttttnaaaaaaanaaaaan

SEQ ID NO: 275 - DNA, 1070 bp, Homo sapiens
  misc_feature (820)..(820): n is a, c, g, or t
  misc_feature (868)..(868): n is a, c, g, or t
  misc_feature (872)..(872): n is a, c, g, or t
  misc_feature (891)..(891): n is a, c, g, or t
  misc_feature (907)..(907): n is a, c, g, or t
  misc_feature (938)..(938): n is a, c, g, or t
  misc_feature (943)..(943): n is a, c, g, or t
  misc_feature (945)..(945): n is a, c, g, or t
  misc_feature (950)..(950): n is a, c, g, or t
  misc_feature (961)..(961): n is a, c, g, or t
  misc_feature (963)..(963): n is a, c, g, or t
  misc_feature (967)..(967): n is a, c, g, or t
  misc_feature (977)..(977): n is a, c, g, or t
  misc_feature (985)..(985): n is a, c, g, or t
  misc_feature (998)..(998): n is a, c, g, or t
  misc_feature (1003)..(1003): n is a, c, g, or t
  misc_feature (1005)..(1005): n is a, c, g, or t
  misc_feature (1010)..(1010): n is a, c, g, or t
  misc_feature (1021)..(1022): n is a, c, g, or t
  misc_feature (1036)..(1037): n is a, c, g, or t
  misc_feature (1041)..(1041): n is a, c, g, or t
  misc_feature (1048)..(1048): n is a, c, g, or t
  misc_feature (1051)..(1051): n is a, c, g, or t
  misc_feature (1056)..(1057): n is a, c, g, or t
  misc_feature (1060)..(1060): n is a, c, g, or t
  misc_feature (1062)..(1062): n is a, c, g, or t
ggtgcagaggaaaccgaagaggaggtggtggcggaaaatccctgccagaaccaccactgcaaacacggcaaggtgtgcagcaatgacaacaagaccttcgactcttcctgccacttctttgccacaaagtgcaccctggagggcaccaagaagggccacaagctccacctggactacatcgggccttgcaaatacatccccccttgcctggactctgagctgaccgaattccccctgcgcatgcgggactggctcaagaacgtcctggtcaccctgtatgagagggatgaggacaacaaccttctgactgagaagcagaagctgcgggtgaagaagatccatgagaatgagaagcgcctggaggcaggagaccaccccgtggagctgctggcccgggacttcgagaagaactataacatgtacatcttccctgtacactggcagttcggccagctggaccagcaccccattgacgggtacctctcccacaccgagctggctccactgcgtgctcccctcatccccatggagcattgcaccacccgctttttcgagacctgtgacctggacaatgacaagtacatcgccctggatgagtgggccggctgcttcggcatcaagcagaaggatatcgacaaggatcttgtgatctaaatccactccttccacagtaccggattctctctttaaccctccccttcgtgtttcccccaatgtttaaaatgtttggatggtttgttgttctgcctggagacaaggtgctaacatagatttaagtgaatacattaacggtgctaaaaatgaaaattctaaccccaanacatgacattcttagctgtaacttaactattaaggccttttccacacncatnaatagtcccatttttctcnttgccattttgtaacntttgcccattgtcttattggccaatggggtnggacncngaatntgctggggctntncccntaaacacacntttggcancttcaacttttcnctttnanggttncggtttgaaannaaaacttaccgaanncaantttgggntcntttcnnttncngggcctgg

SEQ ID NO: 276 - DNA, 989 bp, Homo sapiens
  misc_feature (705)..(705): n is a, c, g, or t
  misc_feature (729)..(729): n is a, c, g, or t
  misc_feature (801)..(801): n is a, c, g, or t
  misc_feature (815)..(815): n is a, c, g, or t
  misc_feature (820)..(820): n is a, c, g, or t
  misc_feature (830)..(830): n is a, c, g, or t
  misc_feature (842)..(842): n is a, c, g, or t
  misc_feature (850)..(850): n is a, c, g, or t
  misc_feature (872)..(873): n is a, c, g, or t
  misc_feature (885)..(885): n is a, c, g, or t
  misc_feature (890)..(891): n is a, c, g, or t
  misc_feature (896)..(896): n is a, c, g, or t
  misc_feature (902)..(902): n is a, c, g, or t
  misc_feature (907)..(908): n is a, c, g, or t
  misc_feature (935)..(935): n is a, c, g, or t
  misc_feature (944)..(944): n is a, c, g, or t
  misc_feature (947)..(947): n is a, c, g, or t
  misc_feature (951)..(951): n is a, c, g, or t
  misc_feature (953)..(953): n is a, c, g, or t
  misc_feature (959)..(960): n is a, c, g, or t
  misc_feature (964)..(964): n is a, c, g, or t
  misc_feature (966)..(966): n is a, c, g, or t
  misc_feature (974)..(974): n is a, c, g, or t
  misc_feature (982)..(982): n is a, c, g, or t
  misc_feature (988)..(988): n is a, c, g, or t
gggcaggagaagatggactggcttcagctggttttggaggtgcttgtgtttggaagagatgcagggatggcagaggcctggctctgcagccaggagccactggtgcgcagcgctgagctgggttgcacggtcgacgaagttgagagcctcatcaagcggcacgaggccttccagaagtcagcagtggcctgggaggagcgattctgtgcgctggagaagcttactgcgctagaggagcgggagaaggagcgaaagagaaagagggaggaggaggagcggcggaaacagccgcctgctcccgaacccacagccagtgtgcctccaggggacctggtgggcggccagacagcttctgacaccacctgggacggaacccagccacggccaccaccatccacacaagcacccagtgttaatggagtctgcacagatggagagccctcacagcccctgctgggacaacagagacttgagcacagcagcttccccgaagggccgggacctggctcaggggacgaagccaatgggccccggggagagaggcagacccggactcggggcccggccccatctgcaatgccccagagcaggtctaccgagtcagcccatgctgccaccctgccgcctcgaggcccagagccatctgcccaggagcagatggaggggatgctgtgccgcaagcaggagatggaggccttcgggaanaaggctgccaacaggtcctggcanaacgtgtactgtgtcctgcggcgtgggagcctcggctttttacaaagatgccaaggcagccagcgcgggaantgccataccacggnaaaantgcctgtcanccttggccaggncccagggncagcgttcccctttgattaccnnaaagccccaaanatgtnnttcancttggnctttnngggaaggaaaaaaaatatttttttccnggccaaggnatnaagncnaaaaannaccncntgggctancgggtggntaaatng

SEQ ID NO: 277 - DNA, 766 bp, Homo sapiens
ggcatggcgtacccggggcatcctggcgccggcggcgggtactacccaggcgggtatggaggggctcccggagggcctgcgtttcccggacaaactcaggatccgctgtatggttactttgctgctgtagctggacaggatgggcagatagatgctgatgaattgcagagatgtctgacacagtctggcattgctggaggatacaaaccttttaacctggagacttgccggcttatggtttcaatgctggatagagatatgtctggcacaatgggtttcaatgaatttaaagaactctgggctgtactgaatggctggagacaacactttatcagttttgacactgacaggagtggaacagtagacccacaagaattgcagaaggccctgacaacaatgggatttaggttgagtccccaggctgtgaattcaattgcaaaacgatacagcaccaatggaaagatcaccttcgacgactacatcgcctgctgcgtcaaactgagggctcttacagacagctttcgaagacgggatactgctcagcaaggtgttgtgaatttcccatatgatgatttcattcaatgtgtcatgagtgtttaaatcaagaggaagctgcatgaatgtaatcaacattccaactggagctctcctttgcttgtcctctttgccttcggtaatatgtataaacttacatcacgactttctcttaacagctgttgtaaagtttattactttatgtacaactgaagttttgttttagttttga

SEQ ID NO: 278 - DNA, 755 bp, Homo sapiens
  misc_feature (731)..(731): n is a, c, g, or t
  misc_feature (733)..(737): n is a, c, g, or t
  misc_feature (739)..(755): n is a, c, g, or t
gacggttttgagttcatgaaacagaatcaggatgccttcgacgtgatcatcactgactcctcagaccccatgggccccgccgaaagtctcttcaaggagtcctattaccagctcatgaagacagccctcaaggaagatggtgtcctctgctgccagggcgagtgccagtggctgcacctggacctcatcaaggagatgcggcagttctgccagtccctgttccccgtggtggcctatgcctactgcaccatccccacctaccccagcggccagatcggcttcatgctgtgcagcaagaacccgagcacgaacttccaggagccggtgcagccgctgacacagcagcaggtggcgcagatgcagctgaagtactacaactccgacgtgcaccgcgccgcctttgtgctgcccgagtttgcccgcaaggccctgaatgatgtgagctgagcccaggcgccaccactgatgccacccaggacctcggaccttggagcctgcggggtgcctcggcccctccagccccgggccggacctcctgctggctctcgcccaccaaccaagtgttacaagccccagaatgctgcccggcctgccctgctgggcggactgtctgtgtgtctgtctctctggcgttccacctccaagcctataccagctgtgtacagcgccatctctctgccttctgttgcccctcactcaccaaacacgtgtatttatagcaaaaaaaaaanannnnnannnnnnnnnnnnnnnnn

SEQ ID NO: 279 - DNA, 744 bp, Homo sapiens
gcccacgcgtccggcggagggagtcgagccagcgtcgccgcgatggtgttgttggagagcgagcagttcctgacggagctgaccagacttttccagaagtgccggacgtcgggcagcgtctatatcaccttgaagaagtatgacggtcgaaccaaacccattccaaagaaaggtactgtggagggctttgagcccgcagacaacaagtgtctgttaagagctaccgatgggaagaagaagatcagcactgtggtgagctccaaggaagtgaataagtttcagatggcttattcaaacctccttagagctaacatggatgggttgaagaagagagacaaaaagaacaaaactaagaagaccaaagcagcagcagcagcagcagcagcagcacctgccgcagcagcaacagcagcaacaacagcagcaacaacagcagcaacagcagcacagtaaagggcatacatttcctgctttcaccaattaaccactgaattgctattttttccttttggccagatagctaggtttctggttcccccacagtaggtgttttcacataagattagggtccttttggaaagaatagttgcagtgtttataggatagttgtggtaagaatctagtttattttgcatttggctaattggtctgtgctgcatggttatatactcctggattatagattaaaagtctccgtagacatctctgtgaagagcaagctatcattaaacatgtctgtttatc

SEQ ID NO: 280 - DNA, 1152 bp, Homo sapiens
  misc_feature (748)..(748): n is a, c, g, or t
  misc_feature (788)..(788): n is a, c, g, or t
  misc_feature (814)..(814): n is a, c, g, or t
  misc_feature (820)..(820): n is a, c, g, or t
  misc_feature (826)..(826): n is a, c, g, or t
  misc_feature (833)..(833): n is a, c, g, or t
  misc_feature (835)..(835): n is a, c, g, or t
  misc_feature (853)..(853): n is a, c, g, or t
  misc_feature (879)..(879): n is a, c, g, or t
  misc_feature (936)..(936): n is a, c, g, or t
  misc_feature (962)..(962): n is a, c, g, or t
  misc_feature (967)..(967): n is a, c, g, or t
  misc_feature (977)..(977): n is a, c, g, or t
  misc_feature (980)..(980): n is a, c, g, or t
  misc_feature (983)..(983): n is a, c, g, or t
  misc_feature (986)..(986): n is a, c, g, or t
  misc_feature (1000)..(1000): n is a, c, g, or t
  misc_feature (1020)..(1020): n is a, c, g, or t
  misc_feature (1030)..(1030): n is a, c, g, or t
  misc_feature (1040)..(1040): n is a, c, g, or t
  misc_feature (1046)..(1046): n is a, c, g, or t
  misc_feature (1052)..(1052): n is a, c, g, or t
  misc_feature (1055)..(1055): n is a, c, g, or t
  misc_feature (1058)..(1058): n is a, c, g, or t
  misc_feature (1060)..(1060): n is a, c, g, or t
  misc_feature (1066)..(1066): n is a, c, g, or t
  misc_feature (1070)..(1070): n is a, c, g, or t
  misc_feature (1083)..(1083): n is a, c, g, or t
  misc_feature (1087)..(1087): n is a, c, g, or t
  misc_feature (1099)..(1099): n is a, c, g, or t
  misc_feature (1116)..(1116): n is a, c, g, or t
  misc_feature (1121)..(1121): n is a, c, g, or t
  misc_feature (1127)..(1127): n is a, c, g, or t
  misc_feature (1131)..(1131): n is a, c, g, or t
  misc_feature (1137)..(1137): n is a, c, g, or t
  misc_feature (1139)..(1139): n is a, c, g, or t
  misc_feature (1150)..(1151): n is a, c, g, or t
ggacttcacctgttctgtgagaaagatgggaaggccctttgctgggtatgtgcccagtctcggaaacaccgtgaccacgccatggtccctcttgaggaggctgcacaggagtaccaggagaagctccaggtggcattaggggaactgagaagaaagcaggagttggctgagaagttggaagtggaaattgcaataaagagagcagactggaagaaaacagtggaaacacagaaatctaggattcacgcagagtttgtgcagcaaaaaaacttcctggttgaagaagaacagaggcagctgcaggagctggagaaggatgagagggagcagctgagaatcctgggggagaaagaggccaagctggcccagcagagccaggccctacaggagctcatctcagagctagatcgaaggtgccacagctcagcactggaactgctgcaggaggtgataattgtcctggaaaggagtgagtcctggaacctgaaggacctggatattacctctccagaactcaggagtgtgtgccatgtgccagggctgaagaagatgctgaggacatgtgcagtccacatcactctggatccagacacagccaatccgtggctgatactttcagaagatcggagacaagtgaggcttggagacacccagcagagcatacctggaaatgaagagagatttgatagttatcctatggtcctgggtgcccagcactttcactctggaaaacattactgggaggtanatgtgacaggaaaggaggcctgggacctgggtgtctgcanagactctgtgcgcaggaaggggcacntttttngcttanttccaanantggcttctggacaatttnggttgtggaacaaacaaaaatatgangctggcacctaccccccaaactccccctccccctttcaggtgcctcccatgccaagnttgggatttttcctggactttgaagnctggnatggttctcnttnttnaanatcccttgaacaanggctcccctcatctactccnttctttgaangggccctttnaagganctttgnggnccntntttcantccnggtttccatgganggangaaaaaaacaanccccccttaaccctttntcccntgaaanttgnattccnangggtcccccgnnc

SEQ ID NO: 281 - DNA, 1045 bp, Homo sapiens
  misc_feature (745)..(745): n is a, c, g, or t
  misc_feature (853)..(853): n is a, c, g, or t
  misc_feature (872)..(872): n is a, c, g, or t
  misc_feature (883)..(883): n is a, c, g, or t
  misc_feature (887)..(887): n is a, c, g, or t
  misc_feature (895)..(895): n is a, c, g, or t
  misc_feature (897)..(897): n is a, c, g, or t
  misc_feature (902)..(902): n is a, c, g, or t
  misc_feature (912)..(912): n is a, c, g, or t
  misc_feature (915)..(915): n is a, c, g, or t
  misc_feature (925)..(925): n is a, c, g, or t
  misc_feature (927)..(928): n is a, c, g, or t
  misc_feature (939)..(939): n is a, c, g, or t
  misc_feature (946)..(946): n is a, c, g, or t
  misc_feature (962)..(962): n is a, c, g, or t
  misc_feature (972)..(972): n is a, c, g, or t
  misc_feature (974)..(975): n is a, c, g, or t
  misc_feature (977)..(977): n is a, c, g, or t
  misc_feature (994)..(994): n is a, c, g, or t
  misc_feature (996)..(996): n is a, c, g, or t
  misc_feature (998)..(998): n is a, c, g, or t
  misc_feature (1016)..(1016): n is a, c, g, or t
  misc_feature (1020)..(1020): n is a, c, g, or t
  misc_feature (1027)..(1027): n is a, c, g, or t
  misc_feature (1030)..(1030): n is a, c, g, or t
  misc_feature (1034)..(1034): n is a, c, g, or t
  misc_feature (1038)..(1039): n is a, c, g, or t
  misc_feature (1044)..(1045): n is a, c, g, or t
ggtcaagaaggcagaaccacaaagcaagagcctatgctctttgcacttgccatttgttcccagtgctccgacataagcacaaaacaagcagcatttaaagctgtttctgaagtttgtcgcattcctacccatctctttacttttatccagtttaagaaagatctgaaggaaagcatgaaatgtggcatgtggggtcgtgccctccggaaggctatagcggactggtacaatgagaaaggtggcatggcccttgctctggcagttacaaaatataaacagagaaatggctggtctcacaaagatctattaagattgtcacatcttaaaccttccagtgaaggacttgcaattgtgaccaaatatattacaaagggctggaaagaagttcatgaattgtataaagaaaaagcactctctgtggagactgaaaaattattaaagtatctggaggctgtagagaaagtgaagcgcacaagagatgagctagaagtcattcatctaatagaagaacatagattagttagagaacatcttttaacaaatcacttaaagtctaaagaggtatggaaggctttgttacaagaaatgccgcttactgcattactaaggaatctaggaaagatgactgctaattcagtacttgaaccaggaaattcagaagtatctttagtatgtgaaaaactgtgtaatgaaaaactattaaaaaaggctcgtatacatccatttcatattttgatcgcattanaaacttacaagacaggtcatggtctcagagggaaactgaagtggcgccctgatgaaaaaattttgaaagcattggatgctgctttttataaaacatttaaaaacagtngaaccaactgggaaaacgntttcttactanctgntgatgtcngngcctnctatgaaccnaanagttttgggnannataccccaacnctatacngttgctgcaccaatgngcagggttgncnncnaacaaaaaaaatcttangnanttgcttttcccaagaaangggnccctggnccngggncaannaaaann

SEQ ID NO: 282 - DNA, 1087 bp, Homo sapiens
  misc_feature (827)..(827): n is a, c, g, or t
  misc_feature (840)..(840): n is a, c, g, or t
  misc_feature (851)..(851): n is a, c, g, or t
  misc_feature (867)..(867): n is a, c, g, or t
  misc_feature (916)..(916): n is a, c, g, or t
  misc_feature (919)..(919): n is a, c, g, or t
  misc_feature (966)..(966): n is a, c, g, or t
  misc_feature (968)..(968): n is a, c, g, or t
  misc_feature (975)..(975): n is a, c, g, or t
  misc_feature (981)..(981): n is a, c, g, or t
  misc_feature (984)..(984): n is a, c, g, or t
  misc_feature (991)..(992): n is a, c, g, or t
  misc_feature (1001)..(1001): n is a, c, g, or t
  misc_feature (1006)..(1006): n is a, c, g, or t
  misc_feature (1014)..(1014): n is a, c, g, or t
  misc_feature (1035)..(1035): n is a, c, g, or t
  misc_feature (1051)..(1051): n is a, c, g, or t
  misc_feature (1057)..(1057): n is a, c, g, or t
  misc_feature (1066)..(1066): n is a, c, g, or t
  misc_feature (1068)..(1068): n is a, c, g, or t
  misc_feature (1080)..(1081): n is a, c, g, or t
  misc_feature (1083)..(1085): n is a, c, g, or t
  misc_feature (1087)..(1087): n is a, c, g, or t
gccggaaaggcgtttgggatgccaacgatgaggctgctgtcatttgtggtgttggctctatttgctgtcactcaagcagaggaaggagccaggcttttggcttccaaatcactgctgaacagatacgccgtggagggacgagacctgaccttgcagtacaacatctacaatgttggctcaagtgctgcattagacgtggaactatctgatgattccttccctccagaagactttggcattgtgtctggaatgctcaatgtcaaatgggaccggattgcccctgctagcaatgtctcccacactgtggtcctgcgccctctcaaggctggttatttcaacttcacctcggcaacaattacttacctggcccaggaggatgggcccgttgtgattggctctaccagtgcacctggacagggaggaatcctggctcagcgggagtttgacaggcgattctcccctcattttctggactgggcagcctttggggtcatgacccttccctccatcggcatccccctgctattgtggtactccagcaagaggaaatatgacactcccaaaacgaagaagaactgattggggcttccacagccctcctctcccaagaaatccaggctcctctcccaagaaatccaggtgctttccagactccaaagggtatcttaaatgcaatctcttctctcttagcccttggccactttctcctggatcctgccctgctctcagccatagtgaaggaccagccctaggagtctgcgagagcctccttggttccatcgtgaagccataaacaggaatgcctttggcaatagccttgagcctanagggccctctgangccccactgangtgctgttggtttatngctggcaacgtgaattctctcaggggtctaggaagggcattttggaaantgncctgaaaccacccctatccctgcctccccctcccaaaaaaagggggnanaataaantgaaanctntggaacnntggaagaanaccantgtctatnctgggttaaaaaaatgcttantaaggggttttctaanaaaaanaatgccccntnaaaaaaaaaaannannnan

SEQ ID NO: 283 - DNA, 1090 bp, Homo sapiens
  misc_feature (712)..(712): n is a, c, g, or t
  misc_feature (734)..(734): n is a, c, g, or t
  misc_feature (797)..(797): n is a, c, g, or t
  misc_feature (858)..(858): n is a, c, g, or t
  misc_feature (864)..(864): n is a, c, g, or t
  misc_feature (870)..(870): n is a, c, g, or t
  misc_feature (872)..(872): n is a, c, g, or t
  misc_feature (879)..(879): n is a, c, g, or t
  misc_feature (881)..(881): n is a, c, g, or t
  misc_feature (885)..(885): n is a, c, g, or t
  misc_feature (893)..(893): n is a, c, g, or t
  misc_feature (903)..(903): n is a, c, g, or t
  misc_feature (907)..(907): n is a, c, g, or t
  misc_feature (913)..(913): n is a, c, g, or t
  misc_feature (916)..(916): n is a, c, g, or t
  misc_feature (923)..(923): n is a, c, g, or t
  misc_feature (928)..(928): n is a, c, g, or t
  misc_feature (930)..(930): n is a, c, g, or t
  misc_feature (934)..(934): n is a, c, g, or t
  misc_feature (937)..(937): n is a, c, g, or t
  misc_feature (963)..(963): n is a, c, g, or t
  misc_feature (969)..(969): n is a, c, g, or t
  misc_feature (994)..(994): n is a, c, g, or t
  misc_feature (997)..(997): n is a, c, g, or t
  misc_feature (1007)..(1007): n is a, c, g, or t
  misc_feature (1010)..(1010): n is a, c, g, or t
  misc_feature (1019)..(1019): n is a, c, g, or t
  misc_feature (1022)..(1022): n is a, c, g, or t
  misc_feature (1026)..(1026): n is a, c, g, or t
  misc_feature (1029)..(1030): n is a, c, g, or t
  misc_feature (1043)..(1043): n is a, c, g, or t
  misc_feature (1049)..(1049): n is a, c, g, or t
  misc_feature (1057)..(1057): n is a, c, g, or t
  misc_feature (1071)..(1071): n is a, c, g, or t
  misc_feature (1074)..(1075): n is a, c, g, or t
  misc_feature (1078)..(1078): n is a, c, g, or t
gactggccctcccggaggggccgaaggaaaccgcggaaacgaaagggctgggttagggcccggggcagttacacgggccgggccggagtctcaggaccacggggttggctctggccctgtctctgcttcagggtccccggcccgcgctctggccgccagagccaagttggaagaagagtctgaagcgggttcgacttgggacaggggaaaagcggggccctttccgctgctggtccgccccaggatttgcgagcgtcctgggcgcgaaagtccacgagaagtgcagaaggggctcggggatttgttgattggggtggggcgggggagtttgggtaaagaagttgcctggggaatgacactctcccctccacaacagtccgaggttatgcgtctcaatgatcccgcggaaacgctacgggtctaagaacacggatcagggtgtctacctgggtctctcaaagacacaggtcctgtcccctgcaactgctggcagtagcagcagcgacatcgcccctctgccccccccagtgaccctcgtccctccccctcccgacaccatgtcctgccgggatcggacccaggagtttctgtctgcctgcaagtcgctgcagacccgtcagaatggaatccagacaaataagccagctttgcgtgctgtccgacaacgcagtgaattcaccctcatggccaagcgcattgggaaagaccttancaacacatttgccaagctgganaagctgacaatcttggcaaagcgcaagtccctctttgatgataaaccagtggaaattgaaaanctaacatatatcatcaaacaggacatcaatagcctcaacaaacaaattgctcacctccagnatttcntgaaancnagggcancnaaantggccggnacctgcaaanccantccaanacnattgggntttcntngcantcnaaactggcttctatttccaatgactncaatcngttttaaaatgaggaaaaaaacctnaanccccaaaganccngaaaaaaanttntccnggnnctgggtaaccctncccttncccctaancctgggggggggcnttnnttntggggcaaaacc

SEQ ID NO: 284 - DNA, 1084 bp, Homo sapiens
  misc_feature (564)..(564): n is a, c, g, or t
  misc_feature (573)..(576): n is a, c, g, or t
  misc_feature (684)..(684): n is a, c, g, or t
  misc_feature (823)..(823): n is a, c, g, or t
  misc_feature (827)..(827): n is a, c, g, or t
  misc_feature (898)..(898): n is a, c, g, or t
  misc_feature (907)..(907): n is a, c, g, or t
  misc_feature (925)..(925): n is a, c, g, or t
  misc_feature (948)..(948): n is a, c, g, or t
  misc_feature (953)..(953): n is a, c, g, or t
  misc_feature (955)..(955): n is a, c, g, or t
  misc_feature (965)..(965): n is a, c, g, or t
  misc_feature (968)..(968): n is a, c, g, or t
  misc_feature (970)..(970): n is a, c, g, or t
  misc_feature (972)..(972): n is a, c, g, or t
  misc_feature (976)..(976): n is a, c, g, or t
  misc_feature (979)..(979): n is a, c, g, or t
  misc_feature (985)..(985): n is a, c, g, or t
  misc_feature (994)..(994): n is a, c, g, or t
  misc_feature (997)..(997): n is a, c, g, or t
  misc_feature (1004)..(1004): n is a, c, g, or t
  misc_feature (1010)..(1010): n is a, c, g, or t
  misc_feature (1014)..(1014): n is a, c, g, or t
  misc_feature (1026)..(1026): n is a, c, g, or t
  misc_feature (1030)..(1030): n is a, c, g, or t
  misc_feature (1035)..(1036): n is a, c, g, or t
  misc_feature (1047)..(1047): n is a, c, g, or t
  misc_feature (1061)..(1061): n is a, c, g, or t
  misc_feature (1065)..(1065): n is a, c, g, or t
  misc_feature (1072)..(1073): n is a, c, g, or t
  misc_feature (1078)..(1078): n is a, c, g, or t
gacctcttctatgaagacatgaaggagaaccccaaaagggagattcaaaagatcctggagtttgtggggcactccctgccagaggagaccgtggacttcatggttcagcacacgtcgttcaaggagatgaagaagaaccctatgaccaactacaccaccgtcccccaggagttcatggaccacagcatctcccccttcatgaggaaaggcatggctggggactggaagaccaccttcaccgtggcgcagaatgagcgcttcgatgcggactatgcggagaagatggcaggctgcagcctcagcttccgctctgagctgtgagaggggctcctggggtcactgcagagggagtgtgcgaatcaaacctgaccaagcggctcaagaataaaatatgaattgagggcctgggacggtaggtcatgtctgtaatcccagcaatttggaggctgaggtgggaggatcatttgagcccaggagttcgagaccaacctgggcaacatagtgagattctgttaaaaaaataaaataaaataaaaccaatttttaaaaagaaaaaaaaaaaanaaaaaaaannnnaagggcggccgctccctatagtgagtcgtattaagcttaattagctgagcttggactcctgttgatagatccagtaatgacctcagaactccatctggatttgttcanaacgctcggttgccgccgggcgttttttattggtgagaatccaagctagcttggcgagattttcaggagctaaggaagctaaaatggagaaaaaaatcactggatataccaccgttgatatatcccaatggcatccgtnaaanaacattttgaggcatttcagtcagttgctcaatgtacctataaccaaaccgttcacttggaaattacggcntttttaaanaccgtaaaaaaaaataancccaagttttttccggccttttnttccnanttcttgcccnccntnangaangcncctccngaaatttcntanggcattnaaaaangggnaacttggggaantggnaaaanntttcccccttntttaccccgttttncttnaaaaaanntgaancgtttt

SEQ ID NO: 285 - DNA, 1169 bp, Homo sapiens
  misc_feature (733)..(733): n is a, c, g, or t
  misc_feature (781)..(781): n is a, c, g, or t
  misc_feature (783)..(783): n is a, c, g, or t
  misc_feature (794)..(794): n is a, c, g, or t
  misc_feature (810)..(810): n is a, c, g, or t
  misc_feature (812)..(812): n is a, c, g, or t
  misc_feature (830)..(830): n is a, c, g, or t
  misc_feature (840)..(840): n is a, c, g, or t
  misc_feature (866)..(866): n is a, c, g, or t
  misc_feature (882)..(882): n is a, c, g, or t
  misc_feature (885)..(885): n is a, c, g, or t
  misc_feature (887)..(887): n is a, c, g, or t
  misc_feature (895)..(895): n is a, c, g, or t
  misc_feature (912)..(912): n is a, c, g, or t
  misc_feature (938)..(938): n is a, c, g, or t
  misc_feature (947)..(947): n is a, c, g, or t
  misc_feature (954)..(954): n is a, c, g, or t
  misc_feature (963)..(963): n is a, c, g, or t
  misc_feature (971)..(971): n is a, c, g, or t
  misc_feature (981)..(982): n is a, c, g, or t
  misc_feature (992)..(992): n is a, c, g, or t
  misc_feature (1003)..(1006): n is a, c, g, or t
  misc_feature (1026)..(1027): n is a, c, g, or t
  misc_feature (1029)..(1030): n is a, c, g, or t
  misc_feature (1041)..(1041): n is a, c, g, or t
  misc_feature (1044)..(1044): n is a, c, g, or t
  misc_feature (1055)..(1056): n is a, c, g, or t
  misc_feature (1063)..(1064): n is a, c, g, or t
  misc_feature (1067)..(1067): n is a, c, g, or t
  misc_feature (1073)..(1073): n is a, c, g, or t
  misc_feature (1083)..(1083): n is a, c, g, or t
  misc_feature (1085)..(1085): n is a, c, g, or t
  misc_feature (1091)..(1091): n is a, c, g, or t
  misc_feature (1110)..(1110): n is a, c, g, or t
  misc_feature (1112)..(1112): n is a, c, g, or t
  misc_feature (1114)..(1114): n is a, c, g, or t
  misc_feature (1116)..(1116): n is a, c, g, or t
  misc_feature (1124)..(1124): n is a, c, g, or t
  misc_feature (1129)..(1129): n is a, c, g, or t
  misc_feature (1132)..(1132): n is a, c, g, or t
  misc_feature (1139)..(1139): n is a, c, g, or t
  misc_feature (1141)..(1141): n is a, c, g, or t
  misc_feature (1147)..(1147): n is a, c, g, or t
  misc_feature (1169)..(1169): n is a, c, g, or t
gggtccgggcggggctggcgcctcggcgtctcccgggagtgtcccgtccagccgccgagcagggtgcttgagtgtctctgcagaaaagactccaggaccccgccaccatgttcccggagcccccaaccccggggcctccatcgcccgacacgcctcccgactccagtcgcatcagccacggcccagtgcccccctgggccctggccaccatcgtgctggtctcaggcctcctcatcttcagctgctgtttctgtctctaccggaagagctgtcggaggcggacaggcaagaagagccaggcccaagcccaggtccaccttcaggaagtgaaggggctgggccagagttacatagacaaggtgcagccagaagtagaggagctggagccagcaccatccgggccagggcagcaggtggcagacaagcatgagctaggacgactgcagtactccctggattatgacttccagagtggccagctgctggtgggcattctgcaagcaatgggattggcagccttggatcttggtggctcctcggacccctatgtgcgggtctacctgctgccggacaaacggaggcggtacgagaccaaggtgcatcggcagacgctgaaccctcactttggggagaccttcgccttcaaggtcccctacgtggagctggggggcagggtgctggtcatggcggtgtacgacttcgaccgcttctctcgcaatgacgccatcggggnaggtgcgggtccctatgagctccgtggacctgggggcggccagtgcangnctggcgggaanctgcaggcggcttccncngggaggaaccaggaaaancttggggganattctgctttttcccttccgctaatntcccccacggccgggnaancntcaccgtnattcgtccttgaaaggntaaaaaactttaaaaaaaaatggacntaaggaagnattgttnaaatccatnactttaanggtccacctnntttcaagggnggaaaaaaggnnnnggaaaaaaaaaaaacccccnntnnaaaaaaaaaanctntgaaacccctnnttaaaannaanttttanctttcaaggngnccttgngaacaaaatccaaaaaggngnangnggaaattnaaccngtnttgaatnanaaaaanttgggaaaaaaaaaacctttgn

SEQ ID NO: 286 - DNA, 1234 bp, Homo sapiens
  misc_feature (803)..(803): n is a, c, g, or t
  misc_feature (861)..(861): n is a, c, g, or t
  misc_feature (865)..(865): n is a, c, g, or t
  misc_feature (867)..(867): n is a, c, g, or t
  misc_feature (909)..(909): n is a, c, g, or t
  misc_feature (911)..(911): n is a, c, g, or t
  misc_feature (933)..(933): n is a, c, g, or t
  misc_feature (946)..(946): n is a, c, g, or t
  misc_feature (957)..(957): n is a, c, g, or t
  misc_feature (979)..(979): n is a, c, g, or t
  misc_feature (991)..(991): n is a, c, g, or t
  misc_feature (1007)..(1007): n is a, c, g, or t
  misc_feature (1017)..(1019): n is a, c, g, or t
  misc_feature (1025)..(1025): n is a, c, g, or t
  misc_feature (1029)..(1029): n is a, c, g, or t
  misc_feature (1041)..(1041): n is a, c, g, or t
  misc_feature (1043)..(1043): n is a, c, g, or t
  misc_feature (1053)..(1053): n is a, c, g, or t
  misc_feature (1055)..(1055): n is a, c, g, or t
  misc_feature (1064)..(1064): n is a, c, g, or t
  misc_feature (1069)..(1069): n is a, c, g, or t
  misc_feature (1075)..(1075): n is a, c, g, or t
  misc_feature (1078)..(1078): n is a, c, g, or t
  misc_feature (1091)..(1091): n is a, c, g, or t
  misc_feature (1093)..(1093): n is a, c, g, or t
  misc_feature (1103)..(1103): n is a, c, g, or t
  misc_feature (1115)..(1115): n is a, c, g, or t
  misc_feature (1120)..(1120): n is a, c, g, or t
  misc_feature (1122)..(1122): n is a, c, g, or t
  misc_feature (1125)..(1125): n is a, c, g, or t
  misc_feature (1132)..(1132): n is a, c, g, or t
  misc_feature (1136)..(1136): n is a, c, g, or t
  misc_feature (1140)..(1140): n is a, c, g, or t
  misc_feature (1145)..(1145): n is a, c, g, or t
  misc_feature (1158)..(1158): n is a, c, g, or t
  misc_feature (1163)..(1164): n is a, c, g, or t
  misc_feature (1166)..(1166): n is a, c, g, or t
  misc_feature (1187)..(1187): n is a, c, g, or t
  misc_feature (1205)..(1205): n is a, c, g, or t
  misc_feature (1211)..(1211): n is a, c, g, or t
  misc_feature (1213)..(1213): n is a, c, g, or t
  misc_feature (1216)..(1216): n is a, c, g, or t
  misc_feature (1219)..(1219): n is a, c, g, or t
  misc_feature (1225)..(1227): n is a, c, g, or t
gtggagtccgtcagttgctccgctgctgctgtcaggaccggagacatggagtcccagcgggacctgagcctggtgcctgagcggcttcagagacgcgaacaagaacggcagctggaagttgaaaggcggaaacaaaagcggcagaaccaggaggtagagaaggagaacagccactttttcgtcgccacctttgctcgggagcgagcggccgtggaagagcttctggagcgcgcggagtcggtcgagcggctggaggaggcggcctctcggctccaggggctgcagaaactaatcaacgactcagtttttttcctagccgcttacgacctgcggcagggacaagaggcgctggcgcggctgcaggcggccttggccgagcggcgccgggggctgcagcccaagaagcgtttcgctttcaagacccggggaaaggatgctgcttcgtctaccaaagtagacgcggctcctggcatccccccggcagttgaaagcatacaggactccccgctgcccaagaaggcggaaggagacctcggccccagctgggtctgcggtttctccaacctggagtcccaagtcttggagaagagagccagcgagttgcaccagcgcgacgttcttttgaccgaactgagcaactgcacggtcagactgtatggaaatcccaacaccctgcggctaaccaaggcccacagctgcaagctgctctgcggtccggtgtctacctctgttttcctggaggactgcagtgactgcgtgctggcagtggcctgccaacagctccgcatacacagtacgaaaanacacccgcatcttccttgcaggtgaccagcagggccatcgtggaagactgcagtgggnatcnanttccccccttacacctggagctacccgagatcgaaaggactncnaagctctggtttaaatagaacnaaaataactggancgatgttgaanatttaactggctggcccggaanatggcctccccnaactggaatattttcntgaaaaagannnaaaatnccangggaataaccantntcccctgttntncctcctacnaaaanttttcncgntggaattttcccntnttgggccccnaaattatttatntcccncnggnttttttncccntttnaggcnaaaaatgaagggnccccnntnaatttcctaaattccaaaggnaaaaaaaaaaatttttantttttngnctnaanaaaaannnccccccc

SEQ ID NO: 287 - DNA, 1139 bp, Homo sapiens
  misc_feature (717)..(717): n is a, c, g, or t
  misc_feature (751)..(751): n is a, c, g, or t
  misc_feature (756)..(756): n is a, c, g, or t
  misc_feature (783)..(783): n is a, c, g, or t
  misc_feature (798)..(798): n is a, c, g, or t
  misc_feature (800)..(800): n is a, c, g, or t
  misc_feature (842)..(842): n is a, c, g, or t
  misc_feature (848)..(848): n is a, c, g, or t
  misc_feature (875)..(875): n is a, c, g, or t
  misc_feature (882)..(882): n is a, c, g, or t
  misc_feature (894)..(894): n is a, c, g, or t
  misc_feature (913)..(913): n is a, c, g, or t
  misc_feature (922)..(922): n is a, c, g, or t
  misc_feature (940)..(940): n is a, c, g, or t
  misc_feature (953)..(953): n is a, c, g, or t
  misc_feature (966)..(966): n is a, c, g, or t
  misc_feature (972)..(972): n is a, c, g, or t
  misc_feature (975)..(975): n is a, c, g, or t
  misc_feature (982)..(982): n is a, c, g, or t
  misc_feature (985)..(985): n is a, c, g, or t
  misc_feature (998)..(998): n is a, c, g, or t
  misc_feature (1006)..(1006): n is a, c, g, or t
  misc_feature (1008)..(1008): n is a, c, g, or t
  misc_feature (1029)..(1029): n is a, c, g, or t
  misc_feature (1033)..(1033): n is a, c, g, or t
  misc_feature (1035)..(1035): n is a, c, g, or t
  misc_feature (1043)..(1043): n is a, c, g, or t
  misc_feature (1047)..(1047): n is a, c, g, or t
  misc_feature (1060)..(1060): n is a, c, g, or t
  misc_feature (1062)..(1062): n is a, c, g, or t
  misc_feature (1068)..(1068): n is a, c, g, or t
  misc_feature (1081)..(1081): n is a, c, g, or t
  misc_feature (1088)..(1089): n is a, c, g, or t
  misc_feature (1097)..(1098): n is a, c, g, or t
  misc_feature (1103)..(1103): n is a, c, g, or t
  misc_feature (1111)..(1111): n is a, c, g, or t
  misc_feature (1115)..(1115): n is a, c, g, or t
  misc_feature (1119)..(1119): n is a, c, g, or t
  misc_feature (1121)..(1121): n is a, c, g, or t
  misc_feature (1127)..(1127): n is a, c, g, or t
  misc_feature (1135)..(1135): n is a, c, g, or t
  misc_feature (1137)..(1137): n is a, c, g, or t
ggtcatccgagagttggctgcgagggcgctgcacaacctggcccagcaggcacccgagttcagcgccacgcaagtcttcccgaggctgctgtccatgacactgagtccagatcttcacatgaggcatgggtcgattctcgcctgcgcagaagttgcttacgccttgtacaaacttgcagcccaagagaacaggcccgtcacggaccatctggacgagcaggcagtgcagggcctgaagcagattcaccagcagctctatgatcgtcagttatacaggggtctgggaggacagctcatgagacaagcagtgtgtgttttaatagaaaagttgtcactttccaaaatgccctttagaggtgacaccgtaattgatggttggcaatggctgataaatgacactttgagacatctccatctcatctcaagtcactcccgccagcagatgaaggatgcagcagtctcggccctggctgctctatgcagtgaatattacatgaaggagccgggggaggcagatcccgcaattcaggaggagctgatcacgcagtacctggctgagcttcggaaccccgaggagatgactcgctgtggcttctcgttggccttgggcgcccttccaggcttccttctgaaaggccggctccagcaggttctcacaggtttaagagcagttacccacacttcccccgaggacgtaagttttgctgagtccagganagacggcttgaaggccattgcgaggatttgccanactgnttggtgtgaaagcaggagccccaaacnaacctgtgtgcgaananaatgtttccaaatttactgtgcgctgctgggctgcatggacnactacnccacggaacagcaaaagggactgggcncctgggntccccaaggccnccatgaaccattctgatgnatctgaacntttctgctggctcggaanccagcctgaactnaatcaaggcccanacctgngancccatcntgngcttggggggccnacaggccnangaaaaaaatgaccgttttccnggcncncccccccngggnttctgaaccctcngnattttnaagcccccccatncccccgnnccccccannaaaanggaaaaantttnccangnccaaanggcccccngnaa

SEQ ID NO: 288 - DNA, 1040 bp, Homo sapiens
  misc_feature (753)..(753): n is a, c, g, or t
  misc_feature (756)..(756): n is a, c, g, or t
  misc_feature (777)..(777): n is a, c, g, or t
  misc_feature (801)..(801): n is a, c, g, or t
  misc_feature (838)..(838): n is a, c, g, or t
  misc_feature (867)..(867): n is a, c, g, or t
  misc_feature (872)..(872): n is a, c, g, or t
  misc_feature (874)..(874): n is a, c, g, or t
  misc_feature (884)..(884): n is a, c, g, or t
  misc_feature (919)..(919): n is a, c, g, or t
  misc_feature (933)..(933): n is a, c, g, or t
  misc_feature (936)..(936): n is a, c, g, or t
  misc_feature (939)..(939): n is a, c, g, or t
  misc_feature (945)..(945): n is a, c, g, or t
  misc_feature (947)..(947): n is a, c, g, or t
  misc_feature (967)..(967): n is a, c, g, or t
  misc_feature (978)..(978): n is a, c, g, or t
  misc_feature (989)..(989): n is a, c, g, or t
  misc_feature (993)..(993): n is a, c, g, or t
  misc_feature (996)..(996): n is a, c, g, or t
  misc_feature (999)..(999): n is a, c, g, or t
  misc_feature (1003)..(1004): n is a, c, g, or t
  misc_feature (1006)..(1006): n is a, c, g, or t
  misc_feature (1013)..(1014): n is a, c, g, or t
  misc_feature (1022)..(1023): n is a, c, g, or t
  misc_feature (1028)..(1028): n is a, c, g, or t
  misc_feature (1032)..(1032): n is a, c, g, or t
ggcgtcggctgcggcgggtgtgggaggtggcgacggccggggccggggtcctgcccggctgcggaggcgggcgcgacgggcgcgggggtcgctgctcctgaggcgatgatgggcaaggaagaggagattgcgcggatcgcccggaggctggacaagatggtgaccaagaagagcgcggagggagccatggatttgctgcgggagctgaaggccatgcctatcacgctgcacctgctccagtccacccgagtcgggatgtctgtcaacgcccttcggaagcagagctcggatgaggaggtcattgcactggccaagtctctcatcaagtcctggaagaagctcctggatgcttccgatgccaaagccagggagcgggggaggggcatgcctctgcccacgtcctcgagggatgcctcagaggccccggatcccagccgcaagaggccggagctgcccagggcaccgtcgactccgaggatcaccacatttcctccggtgcctgtcacctgtgatgccgtgcgcaacaagtgccgcgagatgctgaccgctgccctgcagacggaccatgaccacgtggccatcggtgcggactgcgagcgcctgtcggctcagatcgaggaatgcatcttccgggacgttggaaacacagacatgaagtataagaaccgtgtacggagtcgtatctccaacctgaaggatgccaagaaccctgacctgcggcggaatgtgctgtgtggggccataacaccccancanatcgctgtgatgacctcaaangaaatggccagtgatgaactgaangaaatccgtaaggccatgaccaaggaggccatccganagcaccaaatggcccgcactggcggcacncaaananactgttcacntgcggcaagtgcaggaaaaaaaactgcacctaacncaggtgcaaacccncanctnttaaanancccatgaccacctttttttntctgcaacaantgtggaaaccnctgnaanttntgcnnanccctccnntaaatttnntgaancttnggccctcc

SEQ ID NO: 289 - DNA, 1068 bp, Homo sapiens
  misc_feature (798)..(798): n is a, c, g, or t
  misc_feature (800)..(800): n is a, c, g, or t
  misc_feature (817)..(817): n is a, c, g, or t
  misc_feature (834)..(834): n is a, c, g, or t
  misc_feature (863)..(863): n is a, c, g, or t
  misc_feature (871)..(871): n is a, c, g, or t
  misc_feature (889)..(889): n is a, c, g, or t
  misc_feature (900)..(900): n is a, c, g, or t
  misc_feature (904)..(904): n is a, c, g, or t
  misc_feature (918)..(918): n is a, c, g, or t
  misc_feature (922)..(922): n is a, c, g, or t
  misc_feature (929)..(929): n is a, c, g, or t
  misc_feature (942)..(942): n is a, c, g, or t
  misc_feature (959)..(959): n is a, c, g, or t
  misc_feature (962)..(962): n is a, c, g, or t
  misc_feature (967)..(967): n is a, c, g, or t
  misc_feature (969)..(969): n is a, c, g, or t
  misc_feature (974)..(975): n is a, c, g, or t
  misc_feature (984)..(984): n is a, c, g, or t
  misc_feature (988)..(988): n is a, c, g, or t
  misc_feature (992)..(992): n is a, c, g, or t
  misc_feature (996)..(996): n is a, c, g, or t
  misc_feature (1010)..(1010): n is a, c, g, or t
  misc_feature (1013)..(1013): n is a, c, g, or t
  misc_feature (1019)..(1019): n is a, c, g, or t
  misc_feature (1023)..(1023): n is a, c, g, or t
  misc_feature (1025)..(1025): n is a, c, g, or t
  misc_feature (1033)..(1033): n is a, c, g, or t
  misc_feature (1036)..(1037): n is a, c, g, or t
  misc_feature (1042)..(1042): n is a, c, g, or t
  misc_feature (1061)..(1061): n is a, c, g, or t
  misc_feature (1068)..(1068): n is a, c, g, or t
ggaagtcaaatggagagtatgctcatcagtggctatgcactcaactgtgtggtgggatcccagggcatgcccaagagaatcgtaaatgcaaaaattgcttgccttgacttcagcctgcaaaaaacaaaaatgaagcttggtgtacaggtggtcattacagaccctgaaaaactggaccaaattagacagagagaatcagatatcaccaaggagagaattcagaagatcctggcaactggtgccaatgttattctaaccactggtggaattgatgatatgtgtctgaagtattttgtggaggctggtgctatggcagttagaagagttttaaaaagggaccttaaacgcattgccaaagcttctggagcaactattctgtcaaccctggccaatttggaaggtgaagaaacttttgaagctgcaatgttgggacaggcagaagaagtggtacaggagagaatttgtgatgatgagctgatcttaatcaaaaatactaaggctcgtacgtctgcatcgattatcttacgtggggcaaatgatttcatgtgtgatgagatggagcgctctttacatgatgcactttgtgtagtgaagagagttttggagtcaaaatctgtggttcccggtgggggtgctgtagaagcagccctttccatataccttgaaaactatgcaaccagcatggggtctcgggaacagcttgcgattgcagagtttgcaagatcacttcttgttattccccaatacactagcagttaatgctgcccaggactccccagatctggttgcaaaattaananctttttcataatgaggncccaggttaacccaaancgtaaaaaatctaaaaatggaatgggtcnttgatttngagcaatggtaaacctcnaaacaacaaancaancaggggtgtttganccancccatanttaaagttaaaantttgaaatttgcaacanaanctgcnanccccnntcctccaantggngatnttantaaattccctcccnaantaaaangaanancctggaanttnnaaaangctgtccccccggaacccntaaggan

SEQ ID NO: 290 - DNA, 809 bp, Homo sapiens
  misc_feature (600)..(600): n is a, c, g, or t
  misc_feature (684)..(684): n is a, c, g, or t
  misc_feature (695)..(695): n is a, c, g, or t
  misc_feature (713)..(713): n is a, c, g, or t
  misc_feature (715)..(715): n is a, c, g, or t
  misc_feature (721)..(722): n is a, c, g, or t
  misc_feature (728)..(728): n is a, c, g, or t
  misc_feature (732)..(732): n is a, c, g, or t
  misc_feature (750)..(750): n is a, c, g, or t
  misc_feature (787)..(787): n is a, c, g, or t
  misc_feature (790)..(790): n is a, c, g, or t
  misc_feature (793)..(793): n is a, c, g, or t
  misc_feature (796)..(797): n is a, c, g, or t
  misc_feature (800)..(800): n is a, c, g, or t
  misc_feature (802)..(806): n is a, c, g, or t
  misc_feature (808)..(809): n is a, c, g, or t
ggtcggactacaaagggaagtacgtggtcctttttctaccctctggacttcacttttgtgtgccccaccgagatcatcgcgttcagcaaccgtgcagaggacttccgcaagctgggctgtgaagtgctgggcgtctcggtggactctcagttcacccacctggcttggatcaacaccccccggaaagagggaggcttgggccccctgaacatccccctgcttgctgacgtgaccagacgcttgtctgaggattacggcgtgctgaaaacagatgagggcattgcctacaggggcctctttatcatcgatggcaagggtgtccttcgccagatcactgttaatgatttgcctgtgggacgctccgtggatgaggctctgcggctggtccaggccttccagtacacagacgagcatggggaagtttgtcccgctggctggaagcctggcagtgacacgattaagcccaacgtggatgacagcaaggaatatttctccaaacacaattaggctggctaacggatagtgagcttgtgcccctgcctaggtgcctgtgctgggtgtccacctgtgcccccacctgggtgccctatgctgacccangaaaggccagacctgcccctccaaactccacagtatggggaaccctggagggctaggccaaggccttctcatgcctccacctanaagctgaatanatgacgccctccccaagncnacccanncgcaanacanggcctaaaaggtaaaccnaataaagtattagggaaaaggtgtgaaaaaaaaaaanaanaanaannaantnnnnnann

SEQ ID NO: 291 - DNA, 1178 bp, Homo sapiens
  misc_feature (816)..(816): n is a, c, g, or t
  misc_feature (820)..(820): n is a, c, g, or t
  misc_feature (851)..(851): n is a, c, g, or t
  misc_feature (855)..(855): n is a, c, g, or t
  misc_feature (898)..(898): n is a, c, g, or t
  misc_feature (914)..(914): n is a, c, g, or t
  misc_feature (924)..(924): n is a, c, g, or t
  misc_feature (955)..(955): n is a, c, g, or t
  misc_feature (960)..(960): n is a, c, g, or t
  misc_feature (966)..(966): n is a, c, g, or t
  misc_feature (977)..(977): n is a, c, g, or t
  misc_feature (990)..(990): n is a, c, g, or t
  misc_feature (1007)..(1007): n is a, c, g, or t
  misc_feature (1009)..(1009): n is a, c, g, or t
  misc_feature (1017)..(1017): n is a, c, g, or t
  misc_feature (1038)..(1039): n is a, c, g, or t
  misc_feature (1041)..(1041): n is a, c, g, or t
  misc_feature (1048)..(1048): n is a, c, g, or t
  misc_feature (1056)..(1056): n is a, c, g, or t
  misc_feature (1067)..(1067): n is a, c, g, or t
  misc_feature (1069)..(1069): n is a, c, g, or t
  misc_feature (1078)..(1078): n is a, c, g, or t
  misc_feature (1085)..(1085): n is a, c, g, or t
  misc_feature (1118)..(1118): n is a, c, g, or t
  misc_feature (1124)..(1124): n is a, c, g, or t
  misc_feature (1131)..(1131): n is a, c, g, or t
  misc_feature (1141)..(1141): n is a, c, g, or t
  misc_feature (1144)..(1144): n is a, c, g, or t
  misc_feature (1149)..(1149): n is a, c, g, or t
  misc_feature (1153)..(1154): n is a, c, g, or t
  misc_feature (1161)..(1161): n is a, c, g, or t
  misc_feature (1163)..(1163): n is a, c, g, or t
  misc_feature (1169)..(1169): n is a, c, g, or t
  misc_feature (1174)..(1174): n is a, c, g, or t
ggcgccgcagagatcatggctgtcctctttttccacaccatgcgctacaagtcccaggacccccggaatccgcacaatgaccgctttgtgctctccaagggccatgcagctcccatcctctacgcggtctgggctgaagctggtttcctggccgaggcggagctgctgaacctgaggaagatcagctccgacttggacgggcacccggtcccgaaacaagctttcaccgacgtggccactggctccctgggccagggcctcggggccgcttgtgggatggcctacaccggcaaatacttcgacaaggccagctaccgagtctattgcttgctgggagacggggagctgtcagagggctctgtatgggaggccatggccttcgccagcatctataagctggacaaccttgtggccattctagacatcaatcgcctgggccagagtgacccggccccactgcagcaccagatggacatctaccagaagcggtgcgaggccttcggttggcatgccatcatcgtggatggacacagcgtggaggagctgtgcaaggcctttggccaggccaagcaccagccaacagccatcattgccaagaccttcaagggccgagggatcacgggggtagaagataaggagtcttggcatgggaagcccctccccaaaaacatggctgagcagatcatccaggagatctacagccagatccagagcaaaaagaagatcctggcaacccctccacaggaggacgcaccctcagtggacattgccaacatccgcatgcccagcctgcccagctacaaagttggggacaanatanccacccgcaaggcctacgggcaggcactggncaanctgggccatgccagtgaccgcatcatccccctggatggggaancccaaaattccacctnctcggaaatnttcaaaaagaacacccggaaccgcttcatcnagtgntaaatngctgaaaaaanatggtgaacatcncggggggctggcccccncnaaaggaangggcccttttgcaaacttttnnanccttttnccccgggnctttaacaaantnccatggccncatttcnaaaaaaaataaccttggggtccatgggggtttncttggnaaaaggncccccaaagnccnaaaantggnnttttggnanccccanaaagntttt

SEQ ID NO: 292 - DNA, 1059 bp, Homo sapiens
  misc_feature (748)..(748): n is a, c, g, or t
  misc_feature (759)..(759): n is a, c, g, or t
  misc_feature (774)..(774): n is a, c, g, or t
  misc_feature (776)..(776): n is a, c, g, or t
  misc_feature (847)..(847): n is a, c, g, or t
  misc_feature (853)..(853): n is a, c, g, or t
  misc_feature (856)..(856): n is a, c, g, or t
  misc_feature (879)..(879): n is a, c, g, or t
  misc_feature (893)..(893): n is a, c, g, or t
  misc_feature (905)..(905): n is a, c, g, or t
  misc_feature (924)..(924): n is a, c, g, or t
  misc_feature (929)..(929): n is a, c, g, or t
  misc_feature (941)..(941): n is a, c, g, or t
  misc_feature (943)..(943): n is a, c, g, or t
  misc_feature (974)..(974): n is a, c, g, or t
  misc_feature (983)..(984): n is a, c, g, or t
  misc_feature (993)..(994): n is a, c, g, or t
  misc_feature (998)..(998): n is a, c, g, or t
  misc_feature (1004)..(1004): n is a, c, g, or t
  misc_feature (1010)..(1010): n is a, c, g, or t
  misc_feature (1017)..(1017): n is a, c, g, or t
  misc_feature (1026)..(1026): n is a, c, g, or t
  misc_feature (1032)..(1032): n is a, c, g, or t
  misc_feature (1036)..(1036): n is a, c, g, or t
  misc_feature (1043)..(1044): n is a, c, g, or t
  misc_feature (1048)..(1048): n is a, c, g, or t
  misc_feature (1051)..(1051): n is a, c, g, or t
  misc_feature (1058)..(1058): n is a, c, g, or t
gcgaggagaatggagaccaaacctgtgataacctgtctcaaaaccctcctcatcatctactccttcgtcttctggatcactggggtgatcctgctggctgttggagtctggggcaaacttactctgggcacctatatctcccttattgccgagaactccacaaatgctccctatgtgctcatcggaactggcaccactattgttgtctttggcctgtttggatgctttgctacatgtcgtggtagcccatggatgctgaaactgtatgccatgtttctgtccctggtgttcctggctgagctcgtagctggcatttcagggtttgtgtttcgtcatgagatcaaggacaccttcctgaggacttacacggacgctatgcagacttacaatggcaatgatgagaggagccgggcagtggaccatgtgcagcgcagcctgagctgctgtggtgtgcagaactacaccaactggagcaccagcccctacttcctggagcatggcatcccccccagctgctgcatgaacgaaactgattgtaatccccaggatctacacaatctgactgtggccgccaccaaagttaaccagaagggttgttatgatctggtaactagtttcatggagactaacatgggaatcatcgctggagtggcgtttggaatcgcattctcccagttaattggcatgctgctggcctgctgtctgtcccggttcatcacggccaatcagtatgagatggtgtaagganaagtctttcanaaatgacggaataananacctgttttaaaaaggaactgcagcaatctttgaaaaactccaaaaaatgttaaagcacagtacataatanacttgnccntgctccctctccccttaccccanaacgtgcaactganactcccacccantctctgctccacctttcancccangtcacgggtaangnccattttgggaaaccctgttgggccaaaaangtaaccagnnccccctgcnnctantcctantgaacntcccccnaggccctgnaagggnccanccccccnntttnaantgggtcna

SEQ ID NO: 293 - DNA, 1049 bp, Homo sapiens
  misc_feature (843)..(843): n is a, c, g, or t
  misc_feature (849)..(849): n is a, c, g, or t
  misc_feature (851)..(851): n is a, c, g, or t
  misc_feature (866)..(866): n is a, c, g, or t
  misc_feature (868)..(869): n is a, c, g, or t
  misc_feature (871)..(871): n is a, c, g, or t
  misc_feature (879)..(879): n is a, c, g, or t
  misc_feature (896)..(896): n is a, c, g, or t
  misc_feature (903)..(903): n is a, c, g, or t
  misc_feature (916)..(916): n is a, c, g, or t
  misc_feature (921)..(921): n is a, c, g, or t
  misc_feature (933)..(933): n is a, c, g, or t
  misc_feature (943)..(943): n is a, c, g, or t
  misc_feature (948)..(948): n is a, c, g, or t
  misc_feature (952)..(952): n is a, c, g, or t
  misc_feature (955)..(955): n is a, c, g, or t
  misc_feature (960)..(961): n is a, c, g, or t
  misc_feature (969)..(969): n is a, c, g, or t
  misc_feature (979)..(982): n is a, c, g, or t
  misc_feature (984)..(984): n is a, c, g, or t
  misc_feature (995)..(995): n is a, c, g, or t
  misc_feature (998)..(998): n is a, c, g, or t
  misc_feature (1018)..(1018): n is a, c, g, or t
  misc_feature (1028)..(1028): n is a, c, g, or t
  misc_feature (1039)..(1039): n is a, c, g, or t
  misc_feature (1044)..(1044): n is a, c, g, or t
gggccgcgactgcgcgcagacactgaccttcagcgcctcggctccagcgccatggcgccctccaggaagttcttcgttgggggaaactggaagatgaacgggcggaagcagagtctgggggagctcatcggcactctgaacgcggccaaggtgccggccgacaccgaggtggtttgtgctccccctactgcctatatcgacttcgcccggcagaagctagatcccaagattgctgtggctgcgcagaactgctacaaagtgactaatggggcttttactggggagatcagccctggcatgatcaaagactgcggagccacgtgggtggtcctggggcactcagagagaaggcatgtctttggggagtcagatgagctgattgggcagaaagtggcccatgctctggcagagggactcggagtaatcgcctgcattggggagaagctagatgaaagggaagctggcatcactgagaaggttgttttcgagcagacaaaggtcatcgcagataacgtgaaggactggagcaaggtcgtcctggcctatgagcctgtgtgggccattggtactggcaagactgcaacaccccaacaggcccaggaagtacacgagaagctccgaggatggctgaagtccaacgtctctgatgcggtggctcagagcacccgtatcatttatggaggctctgtgactggggcaacctgcaaggagctggccagccagcctgatgtggatggcttccttgtgggtggtgcttccctcaagcccgaattcgtggacatcatcaatgccaaacaatgagcccccatccatcttccctaccccttcctgccaagccagggnactaancnagccccaaaaacccnannanctggcccntttcccctgcaaatgcnttctganggggtcaatctgnctccnttcctggggccncatccaaaantggancctnccntttannggttaaantctccccccnnnnangggttgggaancangccaatcccctttccccttnaataaagggntggaaactaanctccnccaag

SEQ ID NO: 294 - DNA, 1219 bp, Homo sapiens
  misc_feature (846)..(846): n is a, c, g, or t
  misc_feature (871)..(871): n is a, c, g, or t
  misc_feature (874)..(874): n is a, c, g, or t
  misc_feature (887)..(887): n is a, c, g, or t
  misc_feature (897)..(897): n is a, c, g, or t
  misc_feature (917)..(917): n is a, c, g, or t
  misc_feature (929)..(929): n is a, c, g, or t
  misc_feature (939)..(939): n is a, c, g, or t
  misc_feature (946)..(946): n is a, c, g, or t
  misc_feature (953)..(953): n is a, c, g, or t
  misc_feature (964)..(964): n is a, c, g, or t
  misc_feature (967)..(967): n is a, c, g, or t
  misc_feature (973)..(973): n is a, c, g, or t
  misc_feature (976)..(976): n is a, c, g, or t
  misc_feature (1003)..(1003): n is a, c, g, or t
  misc_feature (1005)..(1005): n is a, c, g, or t
  misc_feature (1015)..(1015): n is a, c, g, or t
  misc_feature (1023)..(1023): n is a, c, g, or t
  misc_feature (1033)..(1033): n is a, c, g, or t
  misc_feature (1036)..(1036): n is a, c, g, or t
  misc_feature (1039)..(1039): n is a, c, g, or t
  misc_feature (1075)..(1075): n is a, c, g, or t
  misc_feature (1078)..(1078): n is a, c, g, or t
  misc_feature (1101)..(1102): n is a, c, g, or t
  misc_feature (1124)..(1124): n is a, c, g, or t
  misc_feature (1165)..(1165): n is a, c, g, or t
  misc_feature (1176)..(1177): n is a, c, g, or t
  misc_feature (1184)..(1185): n is a, c, g, or t
gcccacgcgtccgaaaagagcgattacattaagctctatgtgcgccgtgtattcatcacagacgacttccatgatatgatgcctaaatacctcaattttgtcaagggtgtggtggactcagatgatctccccttgaatgtttcccgcgagactcttcagcaacataaactgcttaaggtgattaggaagaagcttgttcgtaaaacgctggacatgatcaagaagattgctgatgataaatacaatgatactttttggaaagaatttggtaccaacatcaagcttggtgtgattgaagaccactcgaatcgaacacgtcttgctaaacttcttaggttccagtcttctcatcatccaactgacattactagcctagaccagtatgtggaaagaatgaaggaaaaacaagacaaaatctacttcatggctgggtccagcagaaaagaggctgaatcttctccatttgttgagcgacttctgaaaaagggctatgaagttatttacctcacagaacctgtggatgaatactgtattcaggcccttcccgaatttgatgggaagaggttccagaatgttgccaaggaaggagtgaagttcgatgaaagtgagaaaactaaggagagtcgtgaagcagttgagaaagaatttgagcctctgctgaattggatgaaagataaagcccttaaggacaagattgaaaaggctgtggtgtctcagcgcctgacagaatctccgtgtgctttggtggccagccagtacggatggtctggcaacatggagagaatcatgaaagcacaagcgtaccaaacgggcaaggacatctctacaaattactatgcgagtcanaaaaaacatttgaaattaatcccanacncccgctgatcaanacatgcttcnacgaattagggaagatgaanatgaaaaaccantttggatctngctgggntttgttngaaacaccacnctncggtcnggnatcttttcccgacctaagctatggaananaaaaaaaaangctccccncatttgaacntgnccngagccaagggggaaaaaaccccaaaaaacctgaaanccnccaaaacccccaaaacccacccnnccaaaaaaaatggggggggacnaataaaaaaaccccaggatcccccgaaaaaaaatggaattncccccccttgnncgggggnngaggaaattccttttttgggaaaagttgggcccc

SEQ ID NO: 295 - DNA, 1109 bp, Homo sapiens
  misc_feature (828)..(828): n is a, c, g, or t
  misc_feature (848)..(848): n is a, c, g, or t
  misc_feature (853)..(853): n is a, c, g, or t
  misc_feature (856)..(856): n is a, c, g, or t
  misc_feature (888)..(888): n is a, c, g, or t
  misc_feature (930)..(930): n is a, c, g, or t
  misc_feature (934)..(934): n is a, c, g, or t
  misc_feature (937)..(937): n is a, c, g, or t
  misc_feature (948)..(948): n is a, c, g, or t
  misc_feature (956)..(956): n is a, c, g, or t
  misc_feature (978)..(978): n is a, c, g, or t
  misc_feature (987)..(987): n is a, c, g, or t
  misc_feature (989)..(989): n is a, c, g, or t
  misc_feature (1008)..(1008): n is a, c, g, or t
  misc_feature (1018)..(1018): n is a, c, g, or t
  misc_feature (1020)..(1020): n is a, c, g, or t
  misc_feature (1025)..(1025): n is a, c, g, or t
  misc_feature (1031)..(1031): n is a, c, g, or t
  misc_feature (1033)..(1033): n is a, c, g, or t
  misc_feature (1035)..(1035): n is a, c, g, or t
  misc_feature (1048)..(1048): n is a, c, g, or t
  misc_feature (1050)..(1050): n is a, c, g, or t
  misc_feature (1069)..(1069): n is a, c, g, or t
  misc_feature (1071)..(1071): n is a, c, g, or t
  misc_feature (1073)..(1073): n is a, c, g, or t
  misc_feature (1077)..(1077): n is a, c, g, or t
  misc_feature (1083)..(1085): n is a, c, g, or t
  misc_feature (1089)..(1090): n is a, c, g, or t
  misc_feature (1095)..(1095): n is a, c, g, or t
  misc_feature (1100)..(1100): n is a, c, g, or t
gctaccaaagccatcagtcggtggtcatctttggcttgcaacattgccctggatgctgtcaagatggtacagtttgaggagaatggtcggaaagagattgacataaaaaaatatgcaagagtggaaaagatacctggaggcatcattgaagactcctgtgtcttgcgtggagtcatgattaacaaggatgtgacccatccacgtatgcggcgctatatcaagaaccctcgcattgtgctgctggattcttctctggaatacaagaaaggagaaagccagactgacattgagattacacgagaggaggacttcacccgaattctccagatggaggaagagtacatccagcagctctgtgaggacattatccaactgaagcccgatgtggtcatcactgaaaagggcatctcagatttagctcagcactaccttatgcgggccaatatcacagccatccgcagagtccggaagacagacaataatcgcattgctagagcctgtggggcccggatagtcagccgaccagaggaactgagagaagatgatgttggaacaggagcaggcctgttggaaatcaagaaaattggagatgaatactttactttcatcactgactgcaaagaccccaaggcctgcaccattctcctccggggggctagcaaagagattctctcggaagtagaacgcaacctccaggatgccatgcaagtgtgtcgcaatgttctcctggaccctcagctggtgccagggggtggggcctccgagatggctgtggcccatgccttgacaaaaaaatccaaggccatgactggtgtggaacaatggccnatacagggctgtttgcccangcccnaanaggtcattcctcgtaccctgatccaaaactgnggggccagcaccatccgtctacttacctcccttcgggccaancacnccnagaaaaacttngaaaaccntgggggtaaatggtgaaacggntactttggngnaatgaaagaacctggcaantgggaacccntnggctntaaacngncnaattttaaaaacncngtggaaaacgccgttcccncncnggcnaatttnnnaatnntttcnggccnaaaaaaaag

SEQ ID NO: 296 - DNA, 1066 bp, Homo sapiens
  misc_feature (733)..(733): n is a, c, g, or t
  misc_feature (739)..(739): n is a, c, g, or t
  misc_feature (766)..(766): n is a, c, g, or t
  misc_feature (798)..(798): n is a, c, g, or t
  misc_feature (805)..(805): n is a, c, g, or t
  misc_feature (810)..(810): n is a, c, g, or t
  misc_feature (812)..(812): n is a, c, g, or t
  misc_feature (824)..(824): n is a, c, g, or t
  misc_feature (838)..(838): n is a, c, g, or t
  misc_feature (860)..(860): n is a, c, g, or t
  misc_feature (866)..(866): n is a, c, g, or t
  misc_feature (873)..(873): n is a, c, g, or t
  misc_feature (876)..(876): n is a, c, g, or t
  misc_feature (881)..(881): n is a, c, g, or t
  misc_feature (893)..(894): n is a, c, g, or t
  misc_feature (907)..(907): n is a, c, g, or t
  misc_feature (912)..(912): n is a, c, g, or t
  misc_feature (924)..(924): n is a, c, g, or t
  misc_feature (933)..(933): n is a, c, g, or t
  misc_feature (937)..(937): n is a, c, g, or t
  misc_feature (940)..(940): n is a, c, g, or t
  misc_feature (949)..(949): n is a, c, g, or t
  misc_feature (962)..(962): n is a, c, g, or t
  misc_feature (966)..(966): n is a, c, g, or t
  misc_feature (970)..(970): n is a, c, g, or t
  misc_feature (974)..(974): n is a, c, g, or t
  misc_feature (988)..(988): n is a, c, g, or t
  misc_feature (990)..(990): n is a, c, g, or t
  misc_feature (995)..(996): n is a, c, g, or t
  misc_feature (1007)..(1007): n is a, c, g, or t
  misc_feature (1016)..(1016): n is a, c, g, or t
  misc_feature (1023)..(1023): n is a, c, g, or t
  misc_feature (1028)..(1030): n is a, c, g, or t
  misc_feature (1040)..(1040): n is a, c, g, or t
  misc_feature (1046)..(1046): n is a, c, g, or t
  misc_feature (1049)..(1049): n is a, c, g, or t
  misc_feature (1052)..(1053): n is a, c, g, or t
  misc_feature (1059)..(1059): n is a, c, g, or t
  misc_feature (1064)..(1065): n is a, c, g, or t
gtcccaaacgaggtgcgggacggaagagggggtgaaggccagaggctcggggcttcaagaccgctgtctggagtccccctttccaggccatgtcggggcccacctggctgcccccgaagcagccggagcccgccagagcccctcaggggagggcgatcccccgcggcaccccggggccaccaccggcccacggagcagcactccagccccaccccagggtcaatttttgcccccttccatctgagcagtgttaccaggccccagggggaccggaggatcgggggccggcgtgggtggggtcccatggagtactccagcacacgcaggggctccctgcagacagggggggccttcgccctggaagcctggacgccgagatagacttgctgagcagcacgctggccgagctgaatgggggtcggggtcatgcgtcacggcgaccagaccgacaggcatatgagcccccgccacctcctgcctaccgcacgggctccctgaagccaaatccagcctcgccgctcccagcgtctccctatgggggccccactccagcctcttacactaccgccagcaccccggctggcccagccttccccgtgcaagtgaaggtggcacagccagtgaggggctgcggcccacccaggcggggagcctctcaggcctctgggcccctcccgggcccccactttcctctcccaggccgaggtgaagtctgggggcctggctatagganccaganagagccagggccaggggccaaaaaagnaagctgctggggtctctggccctgcagaaaangaaaagnaggcnancacgggccccangtgccctgaaccancttcaaaagatgaactggatangctganaaaaaantgntcacnaatgaaccaccnnccagcgggaatantttgntaacttaagctntgggtggtngaantgnaaaggaagntggaaaaaaaggnaaantggntttntgggtctgtaaaantnatgcnntttctccctgncctcaggcnatttggnggctnnnaaaaaatttntttggnaanggnnttgggnttttnnc

SEQ ID NO: 297 - DNA, 964 bp, Homo sapiens
  misc_feature (691)..(691): n is a, c, g, or t
  misc_feature (739)..(739): n is a, c, g, or t
  misc_feature (763)..(763): n is a, c, g, or t
  misc_feature (815)..(815): n is a, c, g, or t
  misc_feature (836)..(836): n is a, c, g, or t
  misc_feature (845)..(845): n is a, c, g, or t
  misc_feature (853)..(853): n is a, c, g, or t
  misc_feature (855)..(855): n is a, c, g, or t
  misc_feature (858)..(858): n is a, c, g, or t
  misc_feature (864)..(864): n is a, c, g, or t
  misc_feature (867)..(867): n is a, c, g, or t
  misc_feature (875)..(875): n is a, c, g, or t
  misc_feature (878)..(878): n is a, c, g, or t
  misc_feature (889)..(889): n is a, c, g, or t
  misc_feature (892)..(892): n is a, c, g, or t
  misc_feature (894)..(895): n is a, c, g, or t
  misc_feature (907)..(907): n is a, c, g, or t
  misc_feature (910)..(910): n is a, c, g, or t
  misc_feature (914)..(914): n is a, c, g, or t
  misc_feature (921)..(921): n is a, c, g, or t
  misc_feature (932)..(932): n is a, c, g, or t
  misc_feature (937)..(938): n is a, c, g, or t
  misc_feature (942)..(942): n is a, c, g, or t
  misc_feature (944)..(944): n is a, c, g, or t
  misc_feature (948)..(948): n is a, c, g, or t
  misc_feature (950)..(950): n is a, c, g, or t
  misc_feature (952)..(952): n is a, c, g, or t
ggtgacgacaagcgtgggaaccgggacccggtcgttactaggcctggactcgggggagctgcagtccggcccggagtcgagctccagccccggggtgcatgtgagacagaccaaggaggcgccggccaagctggagtcccaggctgggcagcaggtgtcccgtggggcccgggatcgggtccgttccatgtcggggggccatggtcttcgagttggcgccctggacgtgccggcctcccagttcctgggcagtgccacttctccaggaccacggactgcaccagccgcgaaacctgagaaggcctcagctggcacccgggttcctgtgcaggagaagacgaacctggcggcctatgtgcccctgctgacccagggctgggcggagatcctggtccggaggcccacagggaacaccagctggctgatgagcctggagaacccgctcagccctttctcctcggacatcaacaacatgcccctgcaggagctgtctaacgccctcatggcggctgagcgcttcaaggagcaccgggacacagccctgtacaagtcactgtcggtgccggcagccagcacggccaaaccccctcctctgcctcgctccaacacagactccgccgtggtcatggaggagggaagtccgggcgaggttcctgtgctggtggagcccccagggttggaggacgttgangcagcgctaggcatggacaggcgcacggatgcctacagcaggtcgtcntcagtctccagccaggaggaaaantcgctccacgcggaagaactggttggcaggggcatccccatcgagcgagtcntctcctcggaaggtggccggncctctgtgnacttttcntncanccctcnaanccctgaanaantcagctctttnccnanntgcaaatttganganatcntcgggancctgggaaaangccanntggncngctnancntaagttaagccc

SEQ ID NO: 298 - DNA, 967 bp, Homo sapiens
  misc_feature (666)..(666): n is a, c, g, or t
  misc_feature (782)..(782): n is a, c, g, or t
  misc_feature (831)..(831): n is a, c, g, or t
  misc_feature (839)..(839): n is a, c, g, or t
  misc_feature (845)..(845): n is a, c, g, or t
  misc_feature (867)..(867): n is a, c, g, or t
  misc_feature (877)..(877): n is a, c, g, or t
  misc_feature (889)..(889): n is a, c, g, or t
  misc_feature (900)..(900): n is a, c, g, or t
  misc_feature (903)..(903): n is a, c, g, or t
  misc_feature (923)..(923): n is a, c, g, or t
  misc_feature (928)..(928): n is a, c, g, or t
  misc_feature (930)..(930): n is a, c, g, or t
  misc_feature (937)..(938): n is a, c, g, or t
  misc_feature (945)..(945): n is a, c, g, or t
  misc_feature (950)..(950): n is a, c, g, or t
  misc_feature (955)..(956): n is a, c, g, or t
  misc_feature (958)..(958): n is a, c, g, or t
  misc_feature (963)..(963): n is a, c, g, or t
  misc_feature (966)..(966): n is a, c, g, or t
gctgtggctgatcggaagcagcctgttcctccaggacgtgctgcgcgttcaagccagtctccaaaaaagccgttcaatagtattattgagcatctgtcagtggtattcccatgttacaacagcactgagcttgctggttttattaaaaaagtgcgaagcaaaaacaagaactcactctcaggattgagtattgatgaaattgtccaaagagtgacagaacacattctagatgaacagaaaaagaaaaagccaaacccaggaaaggacaagaggacttatgagcccagctctgccacccccgtgaccaggtcctcccagggctcaccctcggtggttgttgcaccatcacccaaaaccaaggggcagaaagcagaagatgtccctgtgaggattgcactgggtgcaagttcctgtgaaatatgccacgaggtgttcaaatcaaaaaacgtgcgtgtgctcaaatgtgggcacaagtatcacaaagggtgctttaagcagtggcttaaagggcagagcgcttgcccggcctgccagggtcgtgatctcctgacagaagagtcaccttctggaagaggctggcccagtcagaatcaggagctgccttcctgctcttctaggtagtcacacttcactaaagtgtcatccaccagtgtgttgaatccgaanaatgacaattttctaccactggtgtaaaaaacaaacattttgaagacccttgtgcattgtgtgtcacaaagctaaatacatggaaatcgttaaaatcgttgatattaagtaatttnccccactctgagtgaaatacttttgaatgattgccaaccagtggctaanaaaaatgnacggcntaccacacctccatggggttcncttggggctnccgcaagggctnttttgaaggtnggntggctttctttttggaaaanaactntnaaacgtnntccgaanccaantattnntnggganaana

SEQ ID NO: 299 - DNA, 1069 bp, Homo sapiens
  misc_feature (869)..(869): n is a, c, g, or t
  misc_feature (879)..(879): n is a, c, g, or t
  misc_feature (893)..(893): n is a, c, g, or t
  misc_feature (896)..(896): n is a, c, g, or t
  misc_feature (902)..(902): n is a, c, g, or t
  misc_feature (906)..(906): n is a, c, g, or t
  misc_feature (933)..(933): n is a, c, g, or t
  misc_feature (952)..(952): n is a, c, g, or t
  misc_feature (954)..(954): n is a, c, g, or t
  misc_feature (975)..(975): n is a, c, g, or t
  misc_feature (978)..(979): n is a, c, g, or t
  misc_feature (981)..(981): n is a, c, g, or t
  misc_feature (985)..(985): n is a, c, g, or t
  misc_feature (990)..(990): n is a, c, g, or t
  misc_feature (1000)..(1000): n is a, c, g, or t
  misc_feature (1008)..(1008): n is a, c, g, or t
  misc_feature (1017)..(1017): n is a, c, g, or t
  misc_feature (1020)..(1021): n is a, c, g, or t
  misc_feature (1025)..(1025): n is a, c, g, or t
  misc_feature (1036)..(1036): n is a, c, g, or t
  misc_feature (1038)..(1038): n is a, c, g, or t
  misc_feature (1048)..(1048): n is a, c, g, or t
  misc_feature (1050)..(1050): n is a, c, g, or t
  misc_feature (1054)..(1054): n is a, c, g, or t
  misc_feature (1059)..(1059): n is a, c, g, or t
  misc_feature (1064)..(1064): n is a, c, g, or t
  misc_feature (1066)..(1066): n is a, c, g, or t
  misc_feature (1069)..(1069): n is a, c, g, or t
gcccacgcgtccgccacgccgcgcaccgctccgagggccagcgccacccgctccgcagccggcaccatgcgcgagatcgtgcacatccaggcgggccagtgcggcaaccagatcggcgccaagttttgggaggtcatcagcgatgagcatgggatcgaccccacaggcagttaccatggagacagtgacttgcagctggagagaatcaacgtgtactacaatgaggctgctggtaacaaatatgtacctcgggccatcctggtggatctggagcctggcaccatggactctgtcaggtctggacccttcggccagatcttcagaccagacaacttcgtgttcggccagagtggagccgggaataactgggccaagggccactacacagagggagccgagctggtcgactcggtcctggatgtggtgaggaaggagtcagagagctgtgactgtctccagggcttccagctgacccactctctggggggcggcacggggtccgggatgggcaccctgctcatcagcaagatccgggaagagtacccagaccgcatcatgaacaccttcagcgtcatgccctcacccaaggtgtcagacacggtggtggagccctacaacgccaccctctctgtccaccagctggtggaaaacacagatgaaacctactccattgataacgaggccctgtatgacatctgcttccgcaccctgaagctgaccacccccacctacggggacctcaaccacctggtgtcggccaccatgagcggggtcaccacctgcctgcgctttccgggccagctgaacgcaaacctgcgcaagctggcggtgaacatggtgccctttccctcgcctgcacttcttcatgncccggcttcncgccccttgaccanccngggcanccancaataccgggcgctcacggtgcccganctcacccagcaaatgttcnantcccaaaaaatgatggccgcntgnnanccgngccanggccgctacntgaagggnggtgccatnttnngggnccccatttccntnaaggaggggnanaaanaaaanttcancnttn

SEQ ID NO: 300 - DNA, 924 bp, Homo sapiens
  misc_feature (712)..(712): n is a, c, g, or t
  misc_feature (729)..(729): n is a, c, g, or t
  misc_feature (807)..(807): n is a, c, g, or t
  misc_feature (858)..(858): n is a, c, g, or t
  misc_feature (880)..(880): n is a, c, g, or t
  misc_feature (882)..(882): n is a, c, g, or t
  misc_feature (906)..(906): n is a, c, g, or t
  misc_feature (924)..(924): n is a, c, g, or t
ggggtcggcggcgtcggcagcagtgtcgacggcagcggcggcggcgggtgggaaatggcggagtatctggcctccatcttcggcaccgagaaagacaaagtcaactgttcattttatttcaaaattggagcatgtcgtcatggagacaggtgctctcggttgcacaataaaccgacgtttagccagaccattgccctcttgaacatttaccgtaaccctcaaaactcttcccagtctgctgacggtttgcgctgtgccgtgagcgatgtggagatgcaggaacactatgatgagttttttgaggaggtttttacagaaatggaggagaagtatggggaagtagaggagatgaacgtctgtgacaacctgggagaccacctggtggggaacgtgtacgtcaagtttcgccgtgaggaagatgcggaaaaggctgtgattgacttgaataaccgttggtttaatggacagccgatccacgccgagctgtcacccgtgacggacttcagagaagcctgctgccgtcagtatgagatgggagaatgcacacgaggcggcttctgcaacttcatgcatttgaagcccatttccagagagctgcggcgggagctgtatggccgccgtcgcaagaagcatagatcaagatcccgatcccgggagcgtcgttctcggtctagagaccgtggtcgtggcggtggcggtggcggtggtggangtggcggcggacgggancgtgacaggaggcggtcgagagatcgtgaaagatctgggcgattctgaaccatgccatttttaccttatgtctgctanaaagtgttgtagttgattgaccaaaccagttcataaggggaattttttttnaaaaccaccaaaaaaaaaaacntnccaagatgggtttctgaataaaantttgtagtgataacagtn

SEQ ID NO: 301 - DNA, 1230 bp, Homo sapiens
  misc_feature (758)..(758): n is a, c, g, or t
  misc_feature (838)..(838): n is a, c, g, or t
  misc_feature (864)..(864): n is a, c, g, or t
  misc_feature (871)..(871): n is a, c, g, or t
  misc_feature (885)..(885): n is a, c, g, or t
  misc_feature (890)..(890): n is a, c, g, or t
  misc_feature (895)..(895): n is a, c, g, or t
  misc_feature (898)..(898): n is a, c, g, or t
  misc_feature (901)..(901): n is a, c, g, or t
  misc_feature (904)..(904): n is a, c, g, or t
  misc_feature (906)..(906): n is a, c, g, or t
  misc_feature (919)..(919): n is a, c, g, or t
  misc_feature (928)..(928): n is a, c, g, or t
  misc_feature (935)..(935): n is a, c, g, or t
  misc_feature (938)..(938): n is a, c, g, or t
  misc_feature (950)..(950): n is a, c, g, or t
  misc_feature (956)..(956): n is a, c, g, or t
  misc_feature (959)..(959): n is a, c, g, or t
  misc_feature (963)..(963): n is a, c, g, or t
  misc_feature (977)..(977): n is a, c, g, or t
  misc_feature (982)..(982): n is a, c, g, or t
  misc_feature (994)..(994): n is a, c, g, or t
  misc_feature (1000)..(1000): n is a, c, g, or t
  misc_feature (1010)..(1010): n is a, c, g, or t
  misc_feature (1028)..(1028): n is a, c, g, or t
  misc_feature (1030)..(1030): n is a, c, g, or t
  misc_feature (1037)..(1037): n is a, c, g, or t
  misc_feature (1043)..(1043): n is a, c, g, or t
  misc_feature (1046)..(1046): n is a, c, g, or t
  misc_feature (1053)..(1053): n is a, c, g, or t
  misc_feature (1056)..(1056): n is a, c, g, or t
  misc_feature (1062)..(1062): n is a, c, g, or t
  misc_feature (1066)..(1066): n is a, c, g, or t
  misc_feature (1079)..(1079): n is a, c, g, or t
  misc_feature (1099)..(1100): n is a, c, g, or t
  misc_feature (1115)..(1116): n is a, c, g, or t
  misc_feature (1123)..(1123): n is a, c, g, or t
  misc_feature (1130)..(1130): n is a, c, g, or t
  misc_feature (1133)..(1133): n is a, c, g, or t
  misc_feature (1144)..(1144): n is a, c, g, or t
  misc_feature (1155)..(1155): n is a, c, g, or t
  misc_feature (1157)..(1157): n is a, c, g, or t
  misc_feature (1168)..(1168): n is a, c, g, or t
  misc_feature (1171)..(1171): n is a, c, g, or t
  misc_feature (1177)..(1178): n is a, c, g, or t
  misc_feature (1183)..(1184): n is a, c, g, or t
  misc_feature (1186)..(1186): n is a, c, g, or t
  misc_feature (1196)..(1196): n is a, c, g, or t
  misc_feature (1202)..(1202): n is a, c, g, or t
  misc_feature (1205)..(1205): n is a, c, g, or t
  misc_feature (1211)..(1211): n is a, c, g, or t
  misc_feature (1219)..(1219): n is a, c, g, or t
  misc_feature (1224)..(1224): n is a, c, g, or t
  misc_feature (1226)..(1226): n is a, c, g, or t
gcaaagatccaagacaaggaaggcattcctcctgaccagcagaggttgatctttgccggaaagcagctggaagatgggcgcaccctgtctgactacaacatccagaaagagtctaccctgcacctggtgctccgtctcagaggtgggatgcagatcttcgtgaagaccctgactggtaagaccatcactctcgaagtggagccgagtgacaccattgagaatgtcaaggcaaagatccaagacaaggaaggcatccctcctgaccagcagaggttgatctttgccggaaaacagctggaagatggtcgcaccctgtctgactacaacatccagaaagagtccaccttgcacctggtgctccgtctcagaggtgggatgcagatcttcgtgaagaccctgactggtaagaccatcactctcgaggtggagccgagtgacaccattgagaatgtcaaggcaaagatccaagacaaggaaggcatccctcctgaccagcagaggttgatctttgctgggaaacagctggaagatggacgcaccctgtctgactacaacatccagaaagagtccaccctgcacctggtgctccgtcttagaggtgggatgcagatcttcgtgaagaccctgactggtaagaccatcactctcgaagtggagccgagtgacaccattgagaatgtcaaggcaaagatccaaagacaaggaaggcatccctcctgaccagcagaggttgatctttgctgggaaacagctggaanatggacgcaccctgtctgactacaacatccagaaagagtccaccctgcacctggtgctccgtcttaaaggtgggatgcanatcttcgtgaaaacctgactggtaanaccatcnctctcgaagtgganccgantgacnccntcnaanantgtcaaggcaaanatccaaganaaggaangcntccctcctgacnaccaangtngatntttgctgggaaacncctgnaaaaggaacccncctgtngaaataacanttccaaaaaaatcccccngnccctggngccccntcncaaaggnggnagcaantttnctgaaaaccctgnatgggaaaaacctccccctnngggggaaccccgtgnnccccccnaaggtcnggnaaaatcccaanaaggagcctcncnttttacaaagnttntttttnnggaanncnggaaaaagancccctnttnaaaaanccaaaaanccttncntttc

SEQ ID NO: 302 - DNA, 1043 bp, Homo sapiens
  misc_feature (706)..(706): n is a, c, g, or t
  misc_feature (852)..(852): n is a, c, g, or t
  misc_feature (856)..(856): n is a, c, g, or t
  misc_feature (861)..(861): n is a, c, g, or t
  misc_feature (881)..(881): n is a, c, g, or t
  misc_feature (886)..(886): n is a, c, g, or t
  misc_feature (891)..(891): n is a, c, g, or t
  misc_feature (907)..(907): n is a, c, g, or t
  misc_feature (948)..(948): n is a, c, g, or t
  misc_feature (952)..(952): n is a, c, g, or t
  misc_feature (954)..(954): n is a, c, g, or t
  misc_feature (957)..(957): n is a, c, g, or t
  misc_feature (964)..(964): n is a, c, g, or t
  misc_feature (967)..(967): n is a, c, g, or t
  misc_feature (978)..(978): n is a, c, g, or t
  misc_feature (980)..(980): n is a, c, g, or t
  misc_feature (983)..(983): n is a, c, g, or t
  misc_feature (1000)..(1000): n is a, c, g, or t
  misc_feature (1002)..(1002): n is a, c, g, or t
  misc_feature (1004)..(1004): n is a, c, g, or t
  misc_feature (1007)..(1007): n is a, c, g, or t
  misc_feature (1012)..(1012): n is a, c, g, or t
  misc_feature (1015)..(1015): n is a, c, g, or t
  misc_feature (1018)..(1018): n is a, c, g, or t
  misc_feature (1022)..(1022): n is a, c, g, or t
  misc_feature (1028)..(1029): n is a, c, g, or t
gctgccgggcgctccgcgaagatgcagctcaagccgatggagatcaaccccgagatgctgaacaaagtgctgtcccggctgggggtcgccggccagtggcgcttcgtggacgtgctggggctggaagaggagtctctgggctcggtgccagcgcctgcctgcgcgctgctgctgctgtttcccctcacggcccagcatgagaacttcaggaaaaagcagattgaagagctgaagggacaagaagttagtcctaaagtgtacttcatgaagcagaccattgggaattcctgtggcacaatcggacttattcacgcagtggccaataatcaagacaaactgggatttgaggatggatcagttctgaaacagtttctttctgaaacagagaaaatgtcccctgaagacagagcaaaatgctttgaaaagaatgaggccatacaggcagcccatgatgccgtggcacaggaaggccaatgtcgggtagatgacaaggtgaatttccattttattctgtttaacaacgtggatggccacctctatgaacttgatggacgaatgccttttccggtgaaccatggcgccagttcagaggacaccctgctgaaggacgctgccaaggtctgcagagaattcaccgagcgtgagcaaggagaagtccgcttctctgccgtggctctctgcaaggcagcctaatgctctgtggganggactttgctgatttcccctcttcccttcaacatgaaaatatatacccccccatgcagtctaaaatgcttcagtacttgtgaaacacagctgttcttctgttctgcaaacacgccttcccctcagccacacccaggcacttaagcncaancaaantgcacagctgtccactgggnccatngtggngtgagcttcaaatggngaaaccattcctccccagtgtatgtcttgtatccaaaatcnaacncnttnaaatggnctnctttggtttcngnccngaaattaaaaccttggnangnggnttaantgnttncccncaaaannaaaaaaattttttt

SEQ ID NO: 303 - DNA, 1117 bp, Homo sapiens
  misc_feature (787)..(787): n is a, c, g, or t
  misc_feature (876)..(876): n is a, c, g, or t
  misc_feature (888)..(888): n is a, c, g, or t
  misc_feature (901)..(901): n is a, c, g, or t
  misc_feature (908)..(908): n is a, c, g, or t
  misc_feature (911)..(911): n is a, c, g, or t
  misc_feature (919)..(919): n is a, c, g, or t
  misc_feature (948)..(948): n is a, c, g, or t
  misc_feature (957)..(957): n is a, c, g, or t
  misc_feature (966)..(966): n is a, c, g, or t
  misc_feature (972)..(972): n is a, c, g, or t
  misc_feature (975)..(975): n is a, c, g, or t
  misc_feature (977)..(977): n is a, c, g, or t
  misc_feature (980)..(980): n is a, c, g, or t
  misc_feature (982)..(982): n is a, c, g, or t
  misc_feature (987)..(987): n is a, c, g, or t
  misc_feature (994)..(994): n is a, c, g, or t
  misc_feature (1001)..(1001): n is a, c, g, or t
  misc_feature (1003)..(1003): n is a, c, g, or t
  misc_feature (1007)..(1007): n is a, c, g, or t
  misc_feature (1017)..(1017): n is a, c, g, or t
  misc_feature (1020)..(1020): n is a, c, g, or t
  misc_feature (1023)..(1023): n is a, c, g, or t
  misc_feature (1028)..(1028): n is a, c, g, or t
  misc_feature (1040)..(1040): n is a, c, g, or t
  misc_feature (1044)..(1044): n is a, c, g, or t
  misc_feature (1046)..(1048): n is a, c, g, or t
  misc_feature (1050)..(1050): n is a, c, g, or t
  misc_feature (1057)..(1058): n is a, c, g, or t
  misc_feature (1068)..(1068): n is a, c, g, or t
  misc_feature (1081)..(1081): n is a, c, g, or t
  misc_feature (1092)..(1092): n is a, c, g, or t
  misc_feature (1095)..(1095): n is a, c, g, or t
  misc_feature (1101)..(1102): n is a, c, g, or t
  misc_feature (1117)..(1117): n is a, c, g, or t
ggcagctggaagatggcggcgtccgtggtctgtcgggccgctaccgccggggcacaagtgctattgcgcgcccgccgctcgccggccctgctgcggacgccagccttgcggagtacggcaaccttcgctcaggcgctccagttcgtgccggagacgcaggttagcctgctggacaacggcctgcgtgtggcctccgagcagtcctctcagcccacttgcacggtgggagtgtggattgatgttggcagccgttttgagactgagaagaataatggggcaggctactttttggagcatctggctttcaagggaacaaagaatcggcctggcagtgccctggagaaggaggtggagagcatgggggcccatcttaatgcctacagcacccgggagcacacagcttactacatcaaggcgctgtccaaggatctgccgaaagctgtggagctcctgggtgacattgtgcagaactgtagtctggaagactcacagattgagaaggaacgtgatgtgatcctgcgggagatgcaggagaatgatgcatctatgcgagatgtggtctttaactacctgcatgccacagcattccagggcacacctctagcccaggctgtggaggggcccagtgagaatgtcaggaagctgtctcgtgcagacttgaccgagtacctcagcacacattacaaggcccctcgaatggtgctggcagcagctggaggagtggagcaccagcaactgttaaacctcgcccagaagcacctcggtggcatcccatggacatatgcanaggacgctgtgcccactcttactccatgccgcttcactggcagtgagatccgccaccgtgatgatgctctaccttttgcccacgtggcnattgcaataaanggtcctggctggncaacccnganaatgtggnccttgcaagtggccaatgccatcatcggncaatatgantgcccttangggggnggngngcncntgtcnagcccantggcttnangggntggggccaanaanctntgccnaaatttccaaancttncnnntntgttatnnaaaaaagggntttttggggggcnacttttttttntanccaatnnaaaatccataaattn

SEQ ID NO: 304 - DNA, 998 bp, Homo sapiens
  misc_feature (744)..(744): n is a, c, g, or t
  misc_feature (815)..(815): n is a, c, g, or t
  misc_feature (841)..(841): n is a, c, g, or t
  misc_feature (843)..(843): n is a, c, g, or t
  misc_feature (870)..(870): n is a, c, g, or t
  misc_feature (881)..(881): n is a, c, g, or t
  misc_feature (894)..(894): n is a, c, g, or t
  misc_feature (899)..(899): n is a, c, g, or t
  misc_feature (902)..(902): n is a, c, g, or t
  misc_feature (909)..(909): n is a, c, g, or t
  misc_feature (915)..(917): n is a, c, g, or t
  misc_feature (921)..(921): n is a, c, g, or t
  misc_feature (928)..(928): n is a, c, g, or t
  misc_feature (936)..(936): n is a, c, g, or t
  misc_feature (946)..(946): n is a, c, g, or t
  misc_feature (957)..(957): n is a, c, g, or t
  misc_feature (964)..(964): n is a, c, g, or t
  misc_feature (969)..(969): n is a, c, g, or t
  misc_feature (971)..(971): n is a, c, g, or t
  misc_feature (974)..(974): n is a, c, g, or t
  misc_feature (990)..(990): n is a, c, g, or t
  misc_feature (992)..(992): n is a, c, g, or t
  misc_feature (994)..(994): n is a, c, g, or t
  misc_feature (998)..(998): n is a, c, g, or t
ggggacacatgcccctcccccagctgcctctgtgcccccaggtcctgcagcgcccttcccgctggctgtgatccaaaatcccttcagcaatggtggcagtccggcggccgaggctgtcagcggggaggcacgatttgcctatttcccagcgtccagtgtgggagatactacggctgtgtccgtacagaccacagaccagagcttgcaggctggaggccagttctacgtcatgatgacgccccaggatgtgcttcagacaggaacacagaggacgatcgccccccggacacacccttactctccaaaaattgatggaaccagaacaccccgagatgagaggagaagagcccagcacaacgaagtggagcggaggcggagggacaagatcaacaactggatcgtccagctttcgaaaatcattccagactgtaacgcagacaacagcaagacgggagcgagtaaaggagggatcctgtccaaggcctgcgattacatccgggagttgcgccagaccaaccagcgcatgcaggagaccttcaaagaggccgagcggctgcagatggacaacgagctcctgaggcagcagatcgaggagctgaagaatgagaacgccctgcttcgagcccagctgcagcagcacaacctggagatggtgggcgagggcacccggcagtgacgcccgccaccaccgcgcagccgccgccgcccacgccggcctctgctgcccccttccccagcccttancacagagagggacacatgcccctcccccagctgcgtttttttatagtaaatttttaacaaaaaatgggganaaataatgcatttctgtggatacagngnccaccgccctcctcccttggaaacggnatcttccctgnccatccgtctgtntgtcnccnttttccnggcctnnntaanccccggnaattttantggtctcccntggaggcaaanggagggnaaaangnccngccagtctggtgctcngntnttgn

SEQ ID NO: 305 - DNA, 868 bp, Homo sapiens
gaggatgaagagttccctgagcagaaggccggggaggtgattaaccagccaatgatgatggctgccagacagctccatgatgaagctcgcaaatggtccagcaagggcaatgacatcattgcagcagccaagcgcatggctctgctgatggctgagatgtctcggctggtaagagggggcagtggtaccaagcgggcactcattcagtgtgccaaggacatcgccaaggcctcagatgaggtgactcggttggccaaggaggttgccaagcagtgcacagataaacggattagaaccaacctcttacaggtatgtgagcgaatcccaaccataagcacccagctcaaaatcctgtccacagtgaaggccaccatgctgggccggaccaacatcagtgatgaggagtctgagcaggccacagagatgctggttcacaatgcccagaacctcatgcagtctgtgaaggagactgtgcgggaagctgaagctgcttcaatcaaaattcgaacagatgctggatttacactgcgctgggttagaaagactccctggtaccagtaggcacctggctgagcctggctggcacagaaacctctactaaaaagaaggaaaatgatctgagtcccaggagctgcccagagttgctgggagctgaaaaatcacatcctggcctggcacatcagaaaggaatgggggcctcttcaaattagaagacatttatactcttttttcatggacactttgaaatgtgtttctgtataaagcctgtattctcaaacacagttacacttgtgcaccctctatcccaatagcagactgggtttctagcccatggacttcacataagctcagaatccaagtgaacact

SEQ ID NO: 306 - DNA, 1165 bp, Homo sapiens
  misc_feature (764)..(764): n is a, c, g, or t
  misc_feature (787)..(787): n is a, c, g, or t
  misc_feature (813)..(813): n is a, c, g, or t
  misc_feature (835)..(835): n is a, c, g, or t
  misc_feature (840)..(840): n is a, c, g, or t
  misc_feature (853)..(853): n is a, c, g, or t
  misc_feature (856)..(856): n is a, c, g, or t
  misc_feature (870)..(870): n is a, c, g, or t
  misc_feature (882)..(882): n is a, c, g, or t
  misc_feature (885)..(885): n is a, c, g, or t
  misc_feature (904)..(904): n is a, c, g, or t
  misc_feature (928)..(928): n is a, c, g, or t
  misc_feature (947)..(947): n is a, c, g, or t
  misc_feature (957)..(957): n is a, c, g, or t
  misc_feature (966)..(966): n is a, c, g, or t
  misc_feature (969)..(969): n is a, c, g, or t
  misc_feature (977)..(977): n is a, c, g, or t
  misc_feature (989)..(989): n is a, c, g, or t
  misc_feature (1001)..(1001): n is a, c, g, or t
  misc_feature (1020)..(1020): n is a, c, g, or t
  misc_feature (1030)..(1030): n is a, c, g, or t
  misc_feature (1032)..(1032): n is a, c, g, or t
  misc_feature (1037)..(1037): n is a, c, g, or t
  misc_feature (1042)..(1042): n is a, c, g, or t
  misc_feature (1046)..(1046): n is a, c, g, or t
  misc_feature (1057)..(1057): n is a, c, g, or t
  misc_feature (1064)..(1064): n is a, c, g, or t
  misc_feature (1074)..(1074): n is a, c, g, or t
  misc_feature (1081)..(1081): n is a, c, g, or t
  misc_feature (1084)..(1084): n is a, c, g, or t
  misc_feature (1088)..(1088): n is a, c, g, or t
  misc_feature (1097)..(1097): n is a, c, g, or t
  misc_feature (1099)..(1101): n is a, c, g, or t
  misc_feature (1110)..(1110): n is a, c, g, or t
  misc_feature (1113)..(1113): n is a, c, g, or t
  misc_feature (1118)..(1118): n is a, c, g, or t
  misc_feature (1131)..(1131): n is a, c, g, or t
  misc_feature (1135)..(1135): n is a, c, g, or t
  misc_feature (1145)..(1145): n is a, c, g, or t
  misc_feature (1156)..(1156): n is a, c, g, or t
  misc_feature (1161)..(1161): n is a, c, g, or t
gcggacgcgtggggtcgtcgctgccgctgccgctgccactgccactgccacctcgcggatcaggagccagcgttgttcgcccgacgcctcgctgccggtgggaggaagcgagagggaagccgcttgcgggtttgtcgccgctgctcgcccaccgcctggaagagccgagccccggcccagtcggtcgcttgccaccgctcgtagccgttacccgcgggccgccacagccgccggccgggagaggcgcgcgccatggcttctggagccgattcaaaaggtgatgacctatcaacagccattctcaaacagaagaaccgtcccaatcggttaattgttgatgaagccatcaatgaggacaacagtgtggtgtccttgtcccagcccaagatggatgaattgcagttgttccgaggtgacacagtgttgctgaaaggaaagaagagacgagaagctgtttgcatcgtcctttctgatgatacttgttctgatgagaagattcggatgaatagagttgttcggaataaccttcgtgtacgcctaggggatgtcatcagcatccagccatgccctgatgtgaagtacggcaaacgtatccatgtgctgcccattgatgacacagtggaaggcattactggtaatctcttcgaggtataccttaagccgtacttcctggaagcgtatcgacccatccggaaaggagacatttttcttgtccgtggtgggatgcgtgctgtggagttcaaagtggtggaaacagatcctancccttattgcattgttgctccanacacagtgatccactgcgaaagggancctatcaaacgagaggatgagnaaaantccttgaatgaantanggtatgatgacatnggtggctgcagnaancacctagctcaaataaagnaaatggtggaactgcccctgaaanatctgcccttttaaggcantggtgtgaancctctaaanaantctgtttnacgaactcctgnaaagaaaaaacntgattctcaacttaacaangaaatgaacntnttttntgatnaggnccgaaataganaaattgntgggaatttnaaacacnttnaaancttttaaangnnnaaaaaagcnccnccccntttttttgaaaanaaancccccctccnaaaaaaaaatntgggngggg

SEQ ID NO: 307 - DNA, 1173 bp, Homo sapiens
  misc_feature (853)..(853): n is a, c, g, or t
  misc_feature (867)..(867): n is a, c, g, or t
  misc_feature (890)..(890): n is a, c, g, or t
  misc_feature (893)..(893): n is a, c, g, or t
  misc_feature (945)..(945): n is a, c, g, or t
  misc_feature (952)..(952): n is a, c, g, or t
  misc_feature (974)..(974): n is a, c, g, or t
  misc_feature (981)..(981): n is a, c, g, or t
  misc_feature (983)..(983): n is a, c, g, or t
  misc_feature (985)..(985): n is a, c, g, or t
  misc_feature (1011)..(1011): n is a, c, g, or t
  misc_feature (1017)..(1017): n is a, c, g, or t
  misc_feature (1020)..(1020): n is a, c, g, or t
  misc_feature (1025)..(1025): n is a, c, g, or t
  misc_feature (1030)..(1030): n is a, c, g, or t
  misc_feature (1048)..(1048): n is a, c, g, or t
  misc_feature (1065)..(1066): n is a, c, g, or t
  misc_feature (1075)..(1076): n is a, c, g, or t
  misc_feature (1080)..(1080): n is a, c, g, or t
  misc_feature (1089)..(1091): n is a, c, g, or t
  misc_feature (1101)..(1101): n is a, c, g, or t
  misc_feature (1108)..(1108): n is a, c, g, or t
  misc_feature (1111)..(1112): n is a, c, g, or t
  misc_feature (1118)..(1118): n is a, c, g, or t
  misc_feature (1123)..(1123): n is a, c, g, or t
  misc_feature (1138)..(1138): n is a, c, g, or t
  misc_feature (1140)..(1140): n is a, c, g, or t
  misc_feature (1144)..(1144): n is a, c, g, or t
  misc_feature (1152)..(1153): n is a, c, g, or t
  misc_feature (1162)..(1162): n is a, c, g, or t
  misc_feature (1165)..(1165): n is a, c, g, or t
  misc_feature (1172)..(1172): n is a, c, g, or t
gccgccgtagccgcctccgagcccgccgccacatcctctgagcagaagatggctgtgccacccacgtatgccgatcttggcaaatctgccagggatgtcttcaccaagggctatggatttggcttaataaagcttgatttgaaaacaaaatctgagaatggattggaatttacaagctcaggctcagccaacactgagaccaccaaagtgacgggcagtctggaaaccaagtacagatggactgagtacggcctgacgtttacagagaaatggaataccgacaatacactaggcaccgagattactgtggaagatcagcttgcacgtggactgaagctgaccttcgattcatccttctcacctaacactgggaaaaaaaatgctaaaatcaagacagggtacaagcgggagcacattaacctgggctgcgacatggatttcgacattgctgggccttccatccggggtgctctggtgctaggttacgagggctggctggccggctaccagatgaattttgagactgcaaaatcccgagtgacccagagcaactttgcagttggctacaagactgatgaattccagcttcacactaatgtgaatgacgggacagagtttggcggctccatttaccagaaagtgaacaagaagttggagaccgctgtcaatcttgcctggacagcaggaaacagtaacacgcgcttcggaatagcagccaagtatcagattgaccctgacgcctgcttctcggctaaagtgaacaactccagcctgataggtttaggatacactcagactctaaagccaggtattaaactgacactgtcagctcttctggatggcaagaacgtcnatgctggtggcccnagcttggtctaggactggaattncangcataaatgaatactgtacaattgtttaattttaaactattttgcagcatanctacctncaaaattaagggaacctttaanggtgaangncngggaagcaaatattgctaaaattgtnaccccnccnggttnaagtngattccccttttaaaagntacccttcccaaggtannaaaaaaccnntttnccaaaaggnnnttttttgggnaaacccnggnnaaattnggggnccccttttaaagccngntttntttttttnnaaaaggggnccngggggang

SEQ ID NO: 308 - DNA, 1092 bp, Homo sapiens
  misc_feature (814)..(814): n is a, c, g, or t
  misc_feature (839)..(839): n is a, c, g, or t
  misc_feature (847)..(847): n is a, c, g, or t
  misc_feature (873)..(873): n is a, c, g, or t
  misc_feature (889)..(889): n is a, c, g, or t
  misc_feature (904)..(904): n is a, c, g, or t
  misc_feature (906)..(906): n is a, c, g, or t
  misc_feature (917)..(917): n is a, c, g, or t
  misc_feature (920)..(920): n is a, c, g, or t
  misc_feature (940)..(940): n is a, c, g, or t
  misc_feature (956)..(956): n is a, c, g, or t
  misc_feature (976)..(976): n is a, c, g, or t
  misc_feature (982)..(982): n is a, c, g, or t
  misc_feature (996)..(996): n is a, c, g, or t
  misc_feature (1006)..(1006): n is a, c, g, or t
  misc_feature (1009)..(1009): n is a, c, g, or t
  misc_feature (1030)..(1030): n is a, c, g, or t
  misc_feature (1035)..(1035): n is a, c, g, or t
  misc_feature (1048)..(1048): n is a, c, g, or t
  misc_feature (1052)..(1053): n is a, c, g, or t
  misc_feature (1071)..(1071): n is a, c, g, or t
  misc_feature (1073)..(1073): n is a, c, g, or t
  misc_feature (1076)..(1076): n is a, c, g, or t
  misc_feature (1088)..(1088): n is a, c, g, or t
gcccacgcgtccgactcggtggacttctcgctggccgacgccatcaacaccgagttcaagaacacccgcaccaacgagaaggtggagctgcaggagctgaatgaccgcttcgccaactacatcgacaaggtgcgcttcctggagcagcagaataagatcctgctggccgagctcgagcagctcaagggccaaggcaagtcgcgcctgggggacctctacgaggaggagatgcgggagctgcgccggcaggtggaccagctaaccaacgacaaagcccgcgtcgaggtggagcgcgacaacctggccgaggacatcatgcgcctccgggagaaattgcaggaggagatgcttcagagagaggaagccgaaaacaccctgcaatctttcagacaggatgttgacaatgcgtctctggcacgtcttgaccttgaacgcaaagtggaatctttgcaagaagagattgcctttttgaagaaactccacgaagaggaaatccaggagctgcaggctcagattcaggaacagcatgtccaaatcgatgtggatgtttccaagcctgacctcacggctgccctgcgtgacgtacgtcagcaatatgaaagtgtggctgccaagaacctgcaggaggcagaagaatggtacaaatccaagtttgctgacctctctgaggctgccaaccggaacaatgacgccctgcgccaggcaaagcaggagtccactgagtaccggagacaggtgcagtccctcacctgtgaagtggatgcccttaaaggaaccaatgagtccctggaacgccagatgcgtgaaatggaanagaactttgccgttgaagctgctanctaccaanacactattggccgcctgcaggatganattcaaaatatgaagnaggaatggctcgtcncntcgtgaatacnaanacctgctcatgttaaaatgnccttgaaattgaaatngcccctacagaaactgctgnaggcangaaaacaagatttnctgcccttcnaanttttctcctgacctgaggaantatcnggattcctccctngggnnaacccctcaaaagacctntnatnaaacggtgaacnaaaa

SEQ ID NO: 309 - DNA, 1081 bp, Homo sapiens
  misc_feature (867)..(867): n is a, c, g, or t
  misc_feature (878)..(878): n is a, c, g, or t
  misc_feature (884)..(884): n is a, c, g, or t
  misc_feature (896)..(896): n is a, c, g, or t
  misc_feature (911)..(911): n is a, c, g, or t
  misc_feature (917)..(917): n is a, c, g, or t
  misc_feature (921)..(921): n is a, c, g, or t
  misc_feature (941)..(941): n is a, c, g, or t
  misc_feature (945)..(945): n is a, c, g, or t
  misc_feature (951)..(951): n is a, c, g, or t
  misc_feature (956)..(956): n is a, c, g, or t
  misc_feature (965)..(965): n is a, c, g, or t
  misc_feature (990)..(990): n is a, c, g, or t
  misc_feature (993)..(993): n is a, c, g, or t
  misc_feature (1010)..(1010): n is a, c, g, or t
  misc_feature (1015)..(1016): n is a, c, g, or t
  misc_feature (1025)..(1025): n is a, c, g, or t
  misc_feature (1029)..(1030): n is a, c, g, or t
  misc_feature (1032)..(1033): n is a, c, g, or t
  misc_feature (1035)..(1035): n is a, c, g, or t
  misc_feature (1039)..(1040): n is a, c, g, or t
  misc_feature (1061)..(1061): n is a, c, g, or t
  misc_feature (1070)..(1070): n is a, c, g, or t
  misc_feature (1075)..(1075): n is a, c, g, or t
  misc_feature (1080)..(1081): n is a, c, g, or t
ggtctctgcctctccctcccttcctcaggcatcagagcggagacttcagggagaccagagcccagcttgccaggcactgagctagaagccctgccatggcacccctgagaccccttctcatactggccctgctggcatgggttgctctggctgaccaagagtcatgcaagggccgctgcactgagggcttcaacgtggacaagaagtgccagtgtgacgagctctgctcttactaccagagctgctgcacagactatacggctgagtgcaagccccaagtgactcgcggggatgtgttcactatgccggaggatgagtacacggtctatgacgatggcgaggagaaaaacaatgccactgtccatgaacaggtggggggcccctccctgacctctgacctccaggcccagtccaaagggaatcctgagcagacacctgttctgaaacctgaggaagaggcccctgcgcctgaggtgggcgcctctaagcctgaggggatagactcaaggcctgagacccttcatccagggagacctcagcccccagcagaggaggagctgtgcagtgggaagcccttcgacgccttcaccgacctcaagaacggttccctctttgccttccgagggcagtactgctatgaactggacgaaaaggcagtgaggcctgggtaccccaagctcatccgagatgtctggggcatcgagggccccatcgatgccgccttcacccgcatcaactgtcaggggaagacctacctcttcaagggtagtcagtactggcgctttgaggatggtgtcctggaccctgattacccccgaaatatctctgacggcttcgatggcatccggaaaacgtggatgcagcctnggccctcctgnccatanctacagtggccnggagcgggtctactncttcangggnaacagtactgggaataccanttcngcaccncccantcaggaganttgaaggcacctccctgtcgctgtnttnaaactttgcatgagcancggannctggaagantttnnanntntttnngggaaaacttgtgtacaaaancccattttnaccgnatggnn

SEQ ID NO: 310 - DNA, 435 bp, Homo sapiens
  misc_feature (191)..(191): n is a, c, g, or t
  misc_feature (194)..(194): n is a, c, g, or t
  misc_feature (223)..(223): n is a, c, g, or t
  misc_feature (230)..(230): n is a, c, g, or t
  misc_feature (233)..(233): n is a, c, g, or t
  misc_feature (244)..(244): n is a, c, g, or t
  misc_feature (247)..(247): n is a, c, g, or t
  misc_feature (260)..(260): n is a, c, g, or t
  misc_feature (268)..(269): n is a, c, g, or t
  misc_feature (274)..(274): n is a, c, g, or t
  misc_feature (276)..(276): n is a, c, g, or t
  misc_feature (282)..(282): n is a, c, g, or t
  misc_feature (295)..(295): n is a, c, g, or t
  misc_feature (302)..(302): n is a, c, g, or t
  misc_feature (308)..(309): n is a, c, g, or t
  misc_feature (314)..(314): n is a, c, g, or t
  misc_feature (319)..(319): n is a, c, g, or t
  misc_feature (324)..(324): n is a, c, g, or t
  misc_feature (327)..(327): n is a, c, g, or t
  misc_feature (331)..(331): n is a, c, g, or t
  misc_feature (344)..(344): n is a, c, g, or t
  misc_feature (346)..(346): n is a, c, g, or t
  misc_feature (350)..(350): n is a, c, g, or t
  misc_feature (362)..(362): n is a, c, g, or t
  misc_feature (381)..(381): n is a, c, g, or t
  misc_feature (390)..(390): n is a, c, g, or t
  misc_feature (393)..(393): n is a, c, g, or t
  misc_feature (396)..(396): n is a, c, g, or t
  misc_feature (402)..(403): n is a, c, g, or t
  misc_feature (413)..(413): n is a, c, g, or t
  misc_feature (417)..(417): n is a, c, g, or t
gggccaggcgaagcccacgacgttgacatgccggagatccgcctccgccatgtcgtgtcctgcagcagccaggactcgactcactgtgcagaaaatcttctcaaggcagacacttaccgaaaatggcgggcagccaaggcaggcgagaagaccatctctgtggtcctacagttggagaaggaggagcaganacncagtgtgaacattgggaatgatggctcanctttcgngangtgctggtggncanttcaactgaagcnctggggannaaaantntaaggncccttttgggccncccattnttttanntcccntttcnaaaanccncagngggttaaaacccnancccnggtttcccattnttttgggcccttaaaaaantttgttccnggnacncccccnnaaaaaacctnttgnaaccccgggttaaaattt

SEQ ID NO: 311 - DNA, 982 bp, Homo sapiens
  misc_feature (851)..(851): n is a, c, g, or t
  misc_feature (853)..(853): n is a, c, g, or t
  misc_feature (856)..(856): n is a, c, g, or t
  misc_feature (865)..(865): n is a, c, g, or t
  misc_feature (877)..(877): n is a, c, g, or t
  misc_feature (895)..(895): n is a, c, g, or t
  misc_feature (914)..(914): n is a, c, g, or t
  misc_feature (918)..(918): n is a, c, g, or t
  misc_feature (937)..(937): n is a, c, g, or t
  misc_feature (949)..(949): n is a, c, g, or t
  misc_feature (960)..(982): n is a, c, g, or t
gggggtagtcgccgccgccgccgccgctgcagccactgcaggcaccgctgccgccgcctgagtagtgggcttaggaaggaagaggtcatctcgctcggagcttcgctcggaagggtctttgttccctgcagccctcccacgggaatgacaatggataaaagtgagctggtacagaaagccaaactcgctgagcaggctgagcgatatgatgatatggctgcagccatgaaggcagtcacagaacaggggcatgaactctccaacgaagagagaaatctgctctctgttgcctacaagaatgtggtaggcgcccgccgctcttcctggcgtgtcatctccagcattgagcagaaaacagagaggaatgagaagaagcagcagatgggcaaagagtaccgtgagaagatagaggcagaactgcaggacatctgcaatgatgttctggagctgttggacaaatatcttattcccaatgctacacaaccagaaagtaaggtgttctacttgaaaatgaaaggagattattttaggtatctttctgaagtggcatctggagacaacaaacaaaccactgtgtcgaactcccagcaggcttaccaggaagcatttgaaattagtaagaaagaaatgcagcctacacacccaattcgtcttggtctggcactaaatttctcagtcttttactatgagattctaaactctcctgaaaaggcctgtagcctggcaaaaacggcatttgatgaagcaattgctgaattggatacgctgaatgaagagtcttataaagacagcactctgatcatgcagttacttagggacaatctcactctgtggacatcggaaaaccaggnanacnaaggaaacnctggggaagganagaactaatgtttctcgngctttgtgatctgttcagngtcnctctgtaccctcaacatanatccttgtgcgntaaaaaaaaannnnnnnnnnnnnnnnnnnnnnn

SEQ ID NO: 312 - DNA, 1075 bp, Homo sapiens
  misc_feature (757)..(757): n is a, c, g, or t
  misc_feature (793)..(793): n is a, c, g, or t
  misc_feature (843)..(843): n is a, c, g, or t
  misc_feature (882)..(882): n is a, c, g, or t
  misc_feature (902)..(902): n is a, c, g, or t
  misc_feature (912)..(912): n is a, c, g, or t
  misc_feature (938)..(938): n is a, c, g, or t
  misc_feature (946)..(946): n is a, c, g, or t
  misc_feature (955)..(955): n is a, c, g, or t
  misc_feature (988)..(988): n is a, c, g, or t
  misc_feature (999)..(999): n is a, c, g, or t
  misc_feature (1007)..(1007): n is a, c, g, or t
  misc_feature (1010)..(1010): n is a, c, g, or t
  misc_feature (1013)..(1013): n is a, c, g, or t
  misc_feature (1016)..(1017): n is a, c, g, or t
  misc_feature (1019)..(1019): n is a, c, g, or t
  misc_feature (1022)..(1022): n is a, c, g, or t
  misc_feature (1030)..(1030): n is a, c, g, or t
  misc_feature (1036)..(1036): n is a, c, g, or t
  misc_feature (1039)..(1039): n is a, c, g, or t
  misc_feature (1064)..(1064): n is a, c, g, or t
  misc_feature (1068)..(1068): n is a, c, g, or t
  misc_feature (1074)..(1074): n is a, c, g, or t
gcggagacactatccgcttccatccgtcgcgcagaccctgccggagccgctgccgctatggatgatcgagaggatctggtgtaccaggcgaagctggccgagcaggctgagcgatacgacgaaatggtggagtcaatgaagaaagtagcagggatggatgtggagctgacagttgaagaaagaaacctcctatctgttgcatataagaatgtgattggagctagaagagcctcctggagaataatcagcagcattgaacagaaagaagaaaacaagggaggagaagacaagctaaaaatgattcgggaatatcggcaaatggttgagactgagctaaagttaatctgttgtgacattctggatgtactggacaaacacctcattccagcagctaacactggcgagtccaaggttttctattataaaatgaaaggggactaccacaggtatctggcagaatttgccacaggaaacgacaggaaggaggctgcggagaacagcctagtggcttataaagctgctagtgatattgcaatgacagaacttccaccaacgcatcctattcgcttaggtcttgctctcaatttttccgtattctactacgaaattcttaattcccctgaccgtgcctgcaggttggcaaaagcagcttttgatgatgcaattgcagaactggatacgctgagtgaagaaagctataaggactctacacttatcatgcagttgttacgtgataatctgacactatggacttcanacatgcagggtgacggtgaagagcagaataaagaancgctgcaggacgtggaagacgaaaatcagtgagacataagccaacaaganaaaccatctctgaccaccccctcctccccatcccacccnttggaaactccccattgtcnctgaaaaccnccaaatctgacttttacatttggtcncaaaattnaggtcccgncccggttggttttttttttttttttttttaacngttttccaaanttcttaangcnaanaannanttnctgggganttttcnggnccccccttttaggttctttaaaccnaacnggactnc

SEQ ID NO: 313 - DNA, 857 bp, Homo sapiens
gcgcggcgcgagccacagcgcgcggggcgagccagcgagagggcgcgagcggcggcgctgcctgcagcctgcagcctccggccggccggcgagccagtgcgcgtgcgcggcggcggcctccgcagcgaccggggagcggactgaccggcgggagggctagcgagccagcggtgtgaggcgcgaggcgaggccgagccgcgagcgacatgggggaccgggagcagctgctgcagcgggcgcggctggccgagcaggcggagcgctacgacgacatggcctccgctatgaaggcggttgctggtaaaattcctcctagtgtccaagtggaggcagcttgtcttctgtcccagcattttggtgctcctcccgcccctactcctggctgcagtggcattcccttctgcggtggtgacagagctgaatgaacctctctccaatgaagatcgaaatctcctctctgtggcctacaagaatgtggttggtgccaggcgatcttcctggagggtcattagcagcattgagcagaaaaccatggctgatggaaacgaaaagaaattggagaaagttaaagcttaccgggagaagattgagaaggagctggagacagtttgcaatgatgtcctgtctctgcttgacaagttcctgatcaagaactgcaatgatttccagtatgagagcaaggtgttttacctgaaaatgaagggtgattactaccgctacttagcagaggtcgcttctggggagaagaaaaacagtgtggtcgaagcttctgaagctgcctacaaggaagcctttgaaatcagcaaagagcagatgcaacccacgcatcccatccggctgggcctggccctcaactt

SEQ ID NO: 314 - DNA, 947 bp, Homo sapiens
  misc_feature (316)..(316): n is a, c, g, or t
  misc_feature (694)..(694): n is a, c, g, or t
  misc_feature (698)..(698): n is a, c, g, or t
  misc_feature (718)..(718): n is a, c, g, or t
  misc_feature (737)..(737): n is a, c, g, or t
  misc_feature (740)..(740): n is a, c, g, or t
  misc_feature (755)..(755): n is a, c, g, or t
  misc_feature (759)..(759): n is a, c, g, or t
  misc_feature (778)..(778): n is a, c, g, or t
  misc_feature (780)..(780): n is a, c, g, or t
  misc_feature (788)..(788): n is a, c, g, or t
  misc_feature (797)..(797): n is a, c, g, or t
  misc_feature (802)..(802): n is a, c, g, or t
  misc_feature (813)..(813): n is a, c, g, or t
  misc_feature (816)..(816): n is a, c, g, or t
  misc_feature (818)..(818): n is a, c, g, or t
  misc_feature (820)..(820): n is a, c, g, or t
  misc_feature (836)..(836): n is a, c, g, or t
  misc_feature (842)..(842): n is a, c, g, or t
  misc_feature (846)..(846): n is a, c, g, or t
  misc_feature (848)..(849): n is a, c, g, or t
  misc_feature (851)..(851): n is a, c, g, or t
  misc_feature (862)..(862): n is a, c, g, or t
  misc_feature (866)..(866): n is a, c, g, or t
  misc_feature (878)..(878): n is a, c, g, or t
  misc_feature (890)..(890): n is a, c, g, or t
  misc_feature (892)..(892): n is a, c, g, or t
  misc_feature (902)..(902): n is a, c, g, or t
  misc_feature (906)..(906): n is a, c, g, or t
  misc_feature (912)..(912): n is a, c, g, or t
  misc_feature (920)..(920): n is a, c, g, or t
  misc_feature (930)..(930): n is a, c, g, or t
  misc_feature (933)..(933): n is a, c, g, or t
  misc_feature (936)..(937): n is a, c, g, or t
  misc_feature (946)..(946): n is a, c, g, or t
ggcctcctgtcgctgagccctgacgtgcccgtgccatccgaccatggagggactgagtccagcccaggctggggctcctcgggaccctggagcctgagcccctccgactccagcccgtctggggtcacctcccgcctgcctggccgctccaccagcctagtggagggccgcagctgtggctgggtgcccccaccccctggcttcgcaccgctggctccccgcctgggccctgagctgtcaccctcacccacttcgcccactgcaacctccaccaccccctcgcgctacaagactgagctatgtcggaccttctcanagagtgggcgctgccgctacggggccaagtgccagtttgcccatggcctgggcgagctgcgccaggccaatcgccaccccaaatacaagacggaactctgtcacaagttctacctccagggccgctgcccctacggctctcgctgccacttcatccacaaccctagcgaagacctggcggccccgggccaccctcctgtgcttcgccagagcatcagcttctccggcctgccctctggccgccggacctcaccaccaccaccaggcctggccggcccttccctgtcctccagctccttctcgccctccagctccccaccaccacctggggaccttccactgtcaccctctgccttctctgctgcccctggcacccccntggntcgaaaaaaccccaccccantctgttgcccctcctgccnaanggccactcctatcancgtntggggggcccttgggtggncntggttcgnaaccccctntgtanagttccttggnatncnanccttgaataaaaatgncaacancggnannanccttggggggntttnaatttcccgttnttcaaggggggnanttttttgaancaanccccancccggggnaaaccccccnggnaanncccattttna

SEQ ID NO: 315 - DNA, 1108 bp, Homo sapiens
  misc_feature (814)..(814): n is a, c, g, or t
  misc_feature (829)..(829): n is a, c, g, or t
  misc_feature (862)..(862): n is a, c, g, or t
  misc_feature (890)..(890): n is a, c, g, or t
  misc_feature (898)..(898): n is a, c, g, or t
  misc_feature (909)..(909): n is a, c, g, or t
  misc_feature (925)..(925): n is a, c, g, or t
  misc_feature (942)..(942): n is a, c, g, or t
  misc_feature (945)..(945): n is a, c, g, or t
  misc_feature (947)..(947): n is a, c, g, or t
  misc_feature (952)..(952): n is a, c, g, or t
  misc_feature (954)..(954): n is a, c, g, or t
  misc_feature (956)..(956): n is a, c, g, or t
  misc_feature (960)..(960): n is a, c, g, or t
  misc_feature (973)..(973): n is a, c, g, or t
  misc_feature (979)..(979): n is a, c, g, or t
  misc_feature (992)..(992): n is a, c, g, or t
  misc_feature (995)..(995): n is a, c, g, or t
  misc_feature (997)..(997): n is a, c, g, or t
  misc_feature (1002)..(1002): n is a, c, g, or t
  misc_feature (1009)..(1009): n is a, c, g, or t
  misc_feature (1021)..(1021): n is a, c, g, or t
  misc_feature (1027)..(1027): n is a, c, g, or t
  misc_feature (1029)..(1029): n is a, c, g, or t
  misc_feature (1041)..(1041): n is a, c, g, or t
  misc_feature (1050)..(1050): n is a, c, g, or t
  misc_feature (1054)..(1054): n is a, c, g, or t
  misc_feature (1078)..(1078): n is a, c, g, or t
  misc_feature (1080)..(1081): n is a, c, g, or t
  misc_feature (1089)..(1090): n is a, c, g, or t
  misc_feature (1102)..(1103): n is a, c, g, or t
ggtgtggcgcaggcaaggaccctcaaaataaacagcctctaccttgcgagccgtcttccccaggcctgcgtccgagtctccgccgctgcgggcccgctccgacgcggaagatctgactgcagccatgagcagcaatgagtgcttcaagtgtggacgatctggccactgggcccgggaatgtcctactggtggaggccgtggtcgtggaatgagaagccgtggcagaggtggttttacctcggatagaggtttccagtttgtttcctcgtctcttccagacatttgttatcgctgtggtgagtctggtcatcttgccaaggattgtgatcttcaggaggatgcctgctataactgcggtagaggtggccacattgccaaggactgcaaggagcccaagagagagcgagagcaatgctgctacaactgtggcaaaccaggccatctggctcgtgactgcgaccatgcagatgagcagaaatgctattcttgtggagaattcggacacattcaaaaagactgcaccaaagtgaagtgctataggtgtggtgaaactggtcatgtagccatcaactgcagcaagacaagtgaagtcaactgttaccgctgtggcgagtcagggcaccttgcacgggaatgcacaattgaggctacagcctaattattttcctttgtcgcccctcctttttctgattgatggttgtattattttctctgaatcctcttcactggccaaaggttggcagatagaggcaactcccaggccagtgagctttacttgccgtgtaaaaggaggaaaaggggtggaaaaaaaccnaactttctgcatttnaactacaaaaaaagtttatgtttagtttggtanaggtgttatgtaaaatgctttgttaaanaacccccntttccgtgccnctggtgaataagggantgatgaatgggaaaaanttnantcaancnantaanccccgtcctgggnttcctngaaaatgttcccntgntngaagnaaaaccnaatttgggaagntctatnancttcccaaaaanaactttaantttnaaaaaaaggaagggcttggaatgncnnaacccccnnacttttaaaaanntccag

SEQ ID NO: 316 - DNA, 1075 bp, Homo sapiens
  misc_feature (795)..(795): n is a, c, g, or t
  misc_feature (807)..(807): n is a, c, g, or t
  misc_feature (832)..(832): n is a, c, g, or t
  misc_feature (877)..(877): n is a, c, g, or t
  misc_feature (888)..(888): n is a, c, g, or t
  misc_feature (897)..(897): n is a, c, g, or t
  misc_feature (901)..(901): n is a, c, g, or t
  misc_feature (906)..(906): n is a, c, g, or t
  misc_feature (913)..(913): n is a, c, g, or t
  misc_feature (925)..(925): n is a, c, g, or t
  misc_feature (930)..(930): n is a, c, g, or t
  misc_feature (940)..(940): n is a, c, g, or t
  misc_feature (943)..(943): n is a, c, g, or t
  misc_feature (948)..(948): n is a, c, g, or t
  misc_feature (951)..(951): n is a, c, g, or t
  misc_feature (954)..(954): n is a, c, g, or t
  misc_feature (963)..(963): n is a, c, g, or t
  misc_feature (965)..(965): n is a, c, g, or t
  misc_feature (978)..(978): n is a, c, g, or t
  misc_feature (985)..(986): n is a, c, g, or t
  misc_feature (988)..(988): n is a, c, g, or t
  misc_feature (992)..(992): n is a, c, g, or t
  misc_feature (998)..(999): n is a, c, g, or t
  misc_feature (1006)..(1007): n is a, c, g, or t
  misc_feature (1011)..(1012): n is a, c, g, or t
  misc_feature (1024)..(1024): n is a, c, g, or t
  misc_feature (1038)..(1039): n is a, c, g, or t
  misc_feature (1047)..(1047): n is a, c, g, or t
  misc_feature (1055)..(1055): n is a, c, g, or t
gcccacgcgtccgctgacacgcacgactccccccgcggcaactgcacaggttcaggtgaggctattgggaaaatgcagcaacagggaattcctggaggaattttcttccactgtgagagatttgatcaacccataggagaagattcattatgttctattttagaagaactgtggcaagataatgaccagctagagcaacgtcaggaaaaccagaataaccttttaagtcatgtgaaagtattgattaaggagaggggctatgaacataaaaacattgaaaaaataattcatgtgactaccaagcttgttccttcaattaaaagactccataactgtgacacaattttgaagcatactttaaactcacataatcataatagaaacagtgcaacaaagaaccttggcaagatttttggaaatggtaacaatttcccccatagcccttcctctactaagaatgagaatgctaaaacaggagcaaattcctgtgaacatgaccactatgaaaaacatctcagccacaaacaagctcccacccaccatcagaaaattcatcctgaggagaagctttatgtgtgtactgaatgtgtaatgggcttcactcagaagtcacatctgtttgagcatcagagaattcatgctggagaaaagtcccgtgaatgtgacaaaagcaacaaagtcttcccccagaaaccccaggttgatgtacatccaagtgtttatacagggagaaaaaccctatctgtgtactcaatgtgggaaagtctttacccctcaaatcaaaccttcattacncatcaaaaaaantcattaccgggcaaaaaaccctaanaaaatgccagtggaatgtggaaaaaccttttttcccaaaaatcanaacctcttttnaaaccttcngganaattncataccngggaaaaaaaanccttnagaaattgcncgnggaanggnggnaaaaaggcntnctccccaaaactncaacccnntngtantccttnnaaaaacnncctnnccggaaaaaaanccctttgaattccnntgaatggngggaaggnctttccccaaaaaaatctcc

SEQ ID NO: 317 - DNA, 1060 bp, Homo sapiens
  misc_feature (783)..(783): n is a, c, g, or t
  misc_feature (821)..(821): n is a, c, g, or t
  misc_feature (887)..(887): n is a, c, g, or t
  misc_feature (894)..(894): n is a, c, g, or t
  misc_feature (896)..(896): n is a, c, g, or t
  misc_feature (913)..(913): n is a, c, g, or t
  misc_feature (919)..(919): n is a, c, g, or t
  misc_feature (921)..(921): n is a, c, g, or t
  misc_feature (926)..(926): n is a, c, g, or t
  misc_feature (932)..(932): n is a, c, g, or t
  misc_feature (956)..(956): n is a, c, g, or t
  misc_feature (962)..(962): n is a, c, g, or t
  misc_feature (970)..(970): n is a, c, g, or t
  misc_feature (977)..(977): n is a, c, g, or t
  misc_feature (986)..(986): n is a, c, g, or t
  misc_feature (992)..(992): n is a, c, g, or t
  misc_feature (999)..(999): n is a, c, g, or t
  misc_feature (1001)..(1001): n is a, c, g, or t
  misc_feature (1006)..(1007): n is a, c, g, or t
  misc_feature (1012)..(1012): n is a, c, g, or t
  misc_feature (1016)..(1017): n is a, c, g, or t
  misc_feature (1019)..(1019): n is a, c, g, or t
  misc_feature (1029)..(1029): n is a, c, g, or t
  misc_feature (1038)..(1039): n is a, c, g, or t
  misc_feature (1050)..(1050): n is a, c, g, or t
  misc_feature (1055)..(1055): n is a, c, g, or t
  misc_feature (1059)..(1059): n is a, c, g, or t
ggtcagaaattccccatgcagcatgtgctgtgtaatcatcccccctggatcttcacatgcttgtgtgcagaaggtaacatccagcctggggatccgggcccaggggaccaggagaagcagcaacaagcctctgaggggagaccctggagtgatcaagcagaaggtcctgagggagaaggtgccatgcctttgtttggaagaaccaagaaaaggactctgggagcgttctccaggccaccccagaggcagccagtcagctctcggaacggcctcagaggggtggagttagaagccagcccagctcagacagggaaccctgaggaaacagacaaattgttgaagaggatagaagtcttaggatttggaacagtcaactgtggagagtgtggactgagcttcagcaagatgacaaacctgctcagtcaccagcggatacactcaggggagaagccctacgtgtgtggggtatgtgagaagggcttcagcctaaagaagagcctcgccagacaccagaaggcacactcgggggagaagccaattgtgtgcagggagtgtggacgaggctttaaccggaagtcaacgctaatcatacacgaacggacacactccggtgagaaaccttacatgtgcagtgagtgtgggcgaggcttcagccagaagtcaaacctcatcatacaccagaggacacactcaggggaaaagccttacgtgtgccgggaatgtggcaaaggcttcagccagaagtcagctgtcgtgagacaccagaggacacacttggagganaaaaccatcgtgtgcagtgactgtggcctgggcttcancgacaggtcaaacctcatctcccaccaaaggacgcactctggggaaaaccctacccctgcaaggantgtgggncnatgcttcaggcaaagancccccntngtcancccccnaagacccctccaaggaaaaccctntgtgtncggggtgnggggccnacttcaccnaaattnaccctcntntctcnnagggnaacnncnttgggaaaanccttttttnngggttggtggncaagntttnt

SEQ ID NO: 318 - DNA, 865 bp, Homo sapiens
  misc_feature (723)..(723): n is a, c, g, or t
  misc_feature (754)..(754): n is a, c, g, or t
  misc_feature (801)..(801): n is a, c, g, or t
  misc_feature (827)..(827): n is a, c, g, or t
  misc_feature (834)..(834): n is a, c, g, or t
  misc_feature (837)..(837): n is a, c, g, or t
  misc_feature (839)..(839): n is a, c, g, or t
  misc_feature (842)..(842): n is a, c, g, or t
  misc_feature (844)..(844): n is a, c, g, or t
  misc_feature (848)..(848): n is a, c, g, or t
  misc_feature (853)..(854): n is a, c, g, or t
  misc_feature (860)..(860): n is a, c, g, or t
  misc_feature (865)..(865): n is a, c, g, or t
gggtgtgttcaccggatcagagatagcagagcgccgagttggggccacgaaggcgtgaggggagtcgtcgtccctcctgcacgaaagcgtctaagccttggcgacgccgccctgggggacccacgtcaggcctgggatagggaccgctgtccccgggtccctaccaatgtcgcccgtcgctcccggcccagctctacccgcagagtctgatggcagcggccactctgaggacgccaactcagggcactgtgacctttgaagatgtggccgtacacttctcctgggaggaatggggtctccttgatgaggctcaaagatgcctgtaccgtgatgtgatgctggagaacttggctcttttaacctctctagatgttcatcatcagaagcagcaccttggagaaaaacatttcagaagcaatgtgggcagagccttgtttgtgaagacctgcacattccatgtgtcaggggagccttccacctgcagagaagttgggaaggacttcctggccaagttgggatttctccatcaacaggctgctcacactggggagcaatcaaatagcaaaagcgacggtggggccatcagtcacagaggaaaaactcattacaactgtggagaacacacaaaagcattcagcggtaaaacacacacttgttcagcagcagagaaccctcactacagaaagatgttacatatgcagtgaatgtgggaaaatcctttancaaaagctacagtctcaatgaccattggaanacttcacactggaaaaaaagcctttatgaatgtccaaaagtgtgggnaagtccttttaggcaaagcctctaantctcatncancnccngnaaantttcnnctgcantaacn

SEQ ID NO: 319 - DNA, 1096 bp, Homo sapiens
  misc_feature (769)..(769): n is a, c, g, or t
  misc_feature (867)..(867): n is a, c, g, or t
  misc_feature (869)..(869): n is a, c, g, or t
  misc_feature (882)..(882): n is a, c, g, or t
  misc_feature (894)..(894): n is a, c, g, or t
  misc_feature (902)..(902): n is a, c, g, or t
  misc_feature (912)..(912): n is a, c, g, or t
  misc_feature (921)..(921): n is a, c, g, or t
  misc_feature (924)..(924): n is a, c, g, or t
  misc_feature (932)..(932): n is a, c, g, or t
  misc_feature (938)..(938): n is a, c, g, or t
  misc_feature (940)..(940): n is a, c, g, or t
  misc_feature (945)..(945): n is a, c, g, or t
  misc_feature (950)..(950): n is a, c, g, or t
  misc_feature (953)..(953): n is a, c, g, or t
  misc_feature (955)..(955): n is a, c, g, or t
  misc_feature (960)..(960): n is a, c, g, or t
  misc_feature (974)..(974): n is a, c, g, or t
  misc_feature (980)..(980): n is a, c, g, or t
  misc_feature (986)..(986): n is a, c, g, or t
  misc_feature (1010)..(1010): n is a, c, g, or t
  misc_feature (1017)..(1017): n is a, c, g, or t
  misc_feature (1023)..(1023): n is a, c, g, or t
  misc_feature (1039)..(1039): n is a, c, g, or t
  misc_feature (1044)..(1044): n is a, c, g, or t
  misc_feature (1048)..(1048): n is a, c, g, or t
  misc_feature (1052)..(1052): n is a, c, g, or t
  misc_feature (1058)..(1058): n is a, c, g, or t
  misc_feature (1062)..(1062): n is a, c, g, or t
  misc_feature (1067)..(1067): n is a, c, g, or t
  misc_feature (1069)..(1069): n is a, c, g, or t
  misc_feature (1077)..(1077): n is a, c, g, or t
  misc_feature (1086)..(1087): n is a, c, g, or t
  misc_feature (1093)..(1094): n is a, c, g, or t
ggccgcacagctgcgggcagtgtggaaagcgcttccgctggggctcggacctggcgcggcaccagcgcacgcacacgggcgagaagccacacaagtgccctgagtgcgacaagagcttccgcagctcctcggacctggtgcgccaccaaggcgtgcacacgggcgagaagcccttctcctgttccgagtgcggcaagagcttcagccgcagcgcctacctggccgaccaccagcgcatacacacgggcgagaagcctttcggctgcagcgactgcggcaagagcttctcgctgcgctcctacctgctggaccatcggcgtgtgcacaccggtgagcggcccttcggctgcggagagtgcgacaagagcttcaagcagcgcgcgcacctcatcgcgcatcagagcctgcacgccaagatggcccagcccgtggggtgagcagctgacttggccggaaacccgggggaggcccagccacggcacatcctgctttgttcaccactgggactctccttccatctgtggccacctcccgggctgtccgagggaccccagggtacctcacactcggagctcgcctgccctgcttggctctgaggacctgcccagcgctcaaagggaacggaagccttcccctcccgcccccgatcttgtcctctttcccccttctgcgcctagcgttcctcttcccctctagtttcctggagccccaacacattcctggcagggacagcagggtggcaaggactcaggtctaggtcccttcccanaagcccccgagcctcatttgactgtgtggctctttggccccccaccctgtgggggtgggtccatgggtcaggcctctgccctacaaactgtgcctttnantgggcgtggaagnactggccttggnccccccanggggctgctnggaactttnggnaaaaaaanccccananctttnggganccncnggttntaattcacgggggnaggggntttttnggcccccttcccaattccgtttcnaggccanaacaantttgccctgtcctggnaatangaantggnctggcntttncctcngnctaatttncctaaaatnnggtttnnaa

SEQ ID NO: 320 - DNA, 1135 bp, Homo sapiens
  misc_feature (678)..(678): n is a, c, g, or t
  misc_feature (706)..(706): n is a, c, g, or t
  misc_feature (709)..(709): n is a, c, g, or t
  misc_feature (711)..(711): n is a, c, g, or t
  misc_feature (744)..(744): n is a, c, g, or t
  misc_feature (849)..(849): n is a, c, g, or t
  misc_feature (875)..(875): n is a, c, g, or t
  misc_feature (908)..(908): n is a, c, g, or t
  misc_feature (919)..(919): n is a, c, g, or t
  misc_feature (922)..(923): n is a, c, g, or t
  misc_feature (927)..(927): n is a, c, g, or t
  misc_feature (932)..(932): n is a, c, g, or t
  misc_feature (956)..(957): n is a, c, g, or t
  misc_feature (959)..(959): n is a, c, g, or t
  misc_feature (965)..(965): n is a, c, g, or t
  misc_feature (979)..(979): n is a, c, g, or t
  misc_feature (996)..(998): n is a, c, g, or t
  misc_feature (1004)..(1004): n is a, c, g, or t
  misc_feature (1022)..(1022): n is a, c, g, or t
  misc_feature (1032)..(1032): n is a, c, g, or t
  misc_feature (1038)..(1039): n is a, c, g, or t
  misc_feature (1048)..(1048): n is a, c, g, or t
  misc_feature (1056)..(1056): n is a, c, g, or t
  misc_feature (1065)..(1065): n is a, c, g, or t
  misc_feature (1068)..(1068): n is a, c, g, or t
  misc_feature (1085)..(1085): n is a, c, g, or t
  misc_feature (1091)..(1091): n is a, c, g, or t
  misc_feature (1098)..(1098): n is a, c, g, or t
  misc_feature (1102)..(1102): n is a, c, g, or t
  misc_feature (1106)..(1107): n is a, c, g, or t
  misc_feature (1113)..(1113): n is a, c, g, or t
  misc_feature (1117)..(1117): n is a, c, g, or t
  misc_feature (1119)..(1119): n is a, c, g, or t
  misc_feature (1122)..(1122): n is a, c, g, or t
  misc_feature (1124)..(1124): n is a, c, g, or t
  misc_feature (1129)..(1129): n is a, c, g, or t
ggtgagacgggggctggcaagcatgtgccccgggcagtgtttgtagacttggaacccacagtcattgatgaagttcgcactggcacctaccgccagctcttccaccctgagcaacttatcacaggcaaggaagatgctgccaataactatgcccgagggcactacaccattggcaaggagatcattgacctcgtgttggaccgaattcgcaagctggccgaccagtgcacgggtctccagggcttcttggttttccacagctttggtgggggaactggttctgggttcacctccctgctcatggaacgtctctcagttgattatggcaagaagtccaagctggagttctctatttacccggcgccccaggtttccacagctgtagttgagccctacaactccatcctcaccacccacaccaccctggagcactctgattgtgccttcatggtagacaatgaggccatctatgacatctgtcgtagaaacctcgatattgagcgtccaacctatactaacctgaataggttaataggtcaaattgtgtcctccatcactgcttccctgagatttgatggagccctgaatgttgacctgacagaattccagaccaacctggtgccctatccccgcatccacttccctctggccacatatgcccctgtcatctctgctganaaagcctaccatgaacagctttctgtancananatcaccaatgcttgctttgagccagccaaccanatggtgaaatgtgaccctcgccatggtaaatacatggcttgctgcctgttgtaccgtggtgacgtggttcccaaagatgtcaatgctgccattgccaccatcaanaccaagcgtaccatccagttttgggnatgggtgccccactggcttcaaggttggcatcnactaccacccnccnnttgnggggncctgggggaaaacttggccaaggnnanaaaaancttggtgcatgctnaacaaacccaacccatnnntgaagnctgggctcccccggaacnaaaattttanctggannatgccaaanggcctttnttcccgggnacnttgggaagggaaggaanaaaggnaattttnaaancccnngaaaangggntnccntnaaaanaaaaaa

SEQ ID NO: 321 - DNA, 1071 bp, Homo sapiens
  misc_feature (723)..(723): n is a, c, g, or t
  misc_feature (769)..(769): n is a, c, g, or t
  misc_feature (802)..(802): n is a, c, g, or t
  misc_feature (822)..(822): n is a, c, g, or t
  misc_feature (831)..(831): n is a, c, g, or t
  misc_feature (855)..(855): n is a, c, g, or t
  misc_feature (880)..(880): n is a, c, g, or t
  misc_feature (892)..(892): n is a, c, g, or t
  misc_feature (895)..(895): n is a, c, g, or t
  misc_feature (899)..(899): n is a, c, g, or t
  misc_feature (904)..(904): n is a, c, g, or t
  misc_feature (931)..(931): n is a, c, g, or t
  misc_feature (934)..(934): n is a, c, g, or t
  misc_feature (936)..(936): n is a, c, g, or t
  misc_feature (947)..(947): n is a, c, g, or t
  misc_feature (959)..(959): n is a, c, g, or t
  misc_feature (962)..(963): n is a, c, g, or t
  misc_feature (967)..(967): n is a, c, g, or t
  misc_feature (978)..(978): n is a, c, g, or t
  misc_feature (982)..(982): n is a, c, g, or t
  misc_feature (997)..(997): n is a, c, g, or t
  misc_feature (1002)..(1002): n is a, c, g, or t
  misc_feature (1009)..(1009): n is a, c, g, or t
  misc_feature (1012)..(1012): n is a, c, g, or t
  misc_feature (1019)..(1019): n is a, c, g, or t
  misc_feature (1025)..(1025): n is a, c, g, or t
  misc_feature (1027)..(1027): n is a, c, g, or t
  misc_feature (1031)..(1033): n is a, c, g, or t
  misc_feature (1036)..(1036): n is a, c, g, or t
  misc_feature (1038)..(1038): n is a, c, g, or t
  misc_feature (1047)..(1047): n is a, c, g, or t
  misc_feature (1065)..(1065): n is a, c, g, or t
  misc_feature (1068)..(1068): n is a, c, g, or t
gcccacgcgtccgcccacgcgtccgcgctccggaagggtggtcagcgccgtggaggaggtgcccggagcagtgcccaagctgactcgggttccagtgacgatgaggcagccagtgaggcccgcagcaccgccagtgaatgccccagccttctcagcaccactgcagaggacagccttgggggggatgtcgtggatgagcagggccagcaggaagaccttgaggaaaagctgaaggagtatgtggactgtctcacagacaagagtgccaagacccggcagggtgctcttgagagcctgcgcctggccctagcgtcccgcctactccccgacttcttgctggagcgccgcctcacgctagccgatgccctggaaaagtgcctcaagaaagggaagggcgaggaacaagccctggctgctgctgtgctaggcctgctctgcgtgcagctgggccctggacctaagggtgaggagctgtttcacagcctgcagcctctgctggtctctgtgctcagtgacagcacagctagccctgctgcccggctccactgtgcttctgcccttggcctgggctgctacgtggctgccgctgacatccaggacctggtctcttgccttgcctgcttagaaagtgttttcagccagtgaaagtgtgaacctgcggatcgctgccggtgaaaccattgcactgctctttgagcttgcccgggacctttgaggaaggantttgtttacgaaggacatggaaggccctctgcaatgtcctgcgcantctggccactgaacagtaaacaaattaccgtgnccaaggctgatcgttcggcnccagcgttntactttccccgcccgtgcttgcantcccgtggaagggcggttgaatgcnaaaaaaaaaaanaantgcngcttncggcttttgaaagtgcttctacatggncancntgggctccggncaccgaaatttnacnnctgnctttaaggaanttgntgggtttcggcattnccccnccaactnccnaaaaaangacccnancccnnnaanantttttgccntgggcccctttgatgttnctngaa

SEQ ID NO: 322 - DNA, 1087 bp, Homo sapiens
  misc_feature (799)..(799): n is a, c, g, or t
  misc_feature (822)..(822): n is a, c, g, or t
  misc_feature (843)..(843): n is a, c, g, or t
  misc_feature (850)..(850): n is a, c, g, or t
  misc_feature (860)..(860): n is a, c, g, or t
  misc_feature (863)..(863): n is a, c, g, or t
  misc_feature (875)..(875): n is a, c, g, or t
  misc_feature (898)..(898): n is a, c, g, or t
  misc_feature (908)..(908): n is a, c, g, or t
  misc_feature (912)..(912): n is a, c, g, or t
  misc_feature (914)..(914): n is a, c, g, or t
  misc_feature (925)..(925): n is a, c, g, or t
  misc_feature (934)..(934): n is a, c, g, or t
  misc_feature (946)..(946): n is a, c, g, or t
  misc_feature (949)..(949): n is a, c, g, or t
  misc_feature (952)..(952): n is a, c, g, or t
  misc_feature (965)..(965): n is a, c, g, or t
  misc_feature (968)..(968): n is a, c, g, or t
  misc_feature (970)..(970): n is a, c, g, or t
  misc_feature (973)..(973): n is a, c, g, or t
  misc_feature (977)..(978): n is a, c, g, or t
  misc_feature (986)..(986): n is a, c, g, or t
  misc_feature (991)..(991): n is a, c, g, or t
  misc_feature (996)..(996): n is a, c, g, or t
  misc_feature (1000)..(1000): n is a, c, g, or t
  misc_feature (1002)..(1002): n is a, c, g, or t
  misc_feature (1007)..(1007): n is a, c, g, or t
  misc_feature (1009)..(1010): n is a, c, g, or t
  misc_feature (1013)..(1013): n is a, c, g, or t
  misc_feature (1035)..(1035): n is a, c, g, or t
  misc_feature (1038)..(1038): n is a, c, g, or t
  misc_feature (1041)..(1041): n is a, c, g, or t
  misc_feature (1053)..(1053): n is a, c, g, or t
  misc_feature (1065)..(1065): n is a, c, g, or t
  misc_feature (1074)..(1074): n is a, c, g, or t
  misc_feature (1077)..(1077): n is a, c, g, or t
  misc_feature (1086)..(1086): n is a, c, g, or t
gcccacgcgtccgcccacgcgtccgaaggacttcccagacgatgtcatccagtttgcgcggaaccaccccctcatgtacaactctgtcctgcccactggggggcgccctcttttcctacaagttggagccaattacaccttcactcaaattgccgcggaccgggttgcagccgctgacggacactatgacgtcctcttcattggcacagacgttggcacggtgctgaaggtgatctcggtccccaagggcagtaggcccagcgcagaggggctgctcctggaggagctgcacgtgtttgaggactcggccgctgtcaccagcatgcaaatttcttccaagaggcaccagctgtacgtagcctcgcggagcgcggtggcccagatcgcgttgcaccgctgcgctgcccacggccgcgtctgcaccgaatgctgtctggcgcgtgacccctactgcgcctgggacggggtcgcgtgcacgcgcttccagcccagtgccaagaggcggttccggcggcaagacgtaaggaatggcgaccccagcacgttgtgctccggagactcgtctcgtcccgcgctgctggaacacaaggtgttcggcgtggagggcagcagcgcctttctggagtgtgagccccgctcgctgcaggcgcgcgtggagtggactttccagcgcgcaggggtgacagcccacacccaggtgctggcagaggagcgcaccgagcgcaccgcccggggactactgctgcgcaggctgcggcgccgggactcgggcgtgtacttgtgcgccgccgtcgagcanggctttacgcaaccgctgcgtcncctgtcgctgcacgtgttgantgctacncaggccgaangantggcgcgggccnaagaagctgcgcccgccgcgccnccgggccccnaaantntggtacgggantttttgcanctggtggaaccnggncgnaagtggaaacccnaantnccntggnnatgtgccncccgnaaacntggncntgaantnntgnccctgggaattcccgaaaaaanggnccntaaccggaaganccccccccctgnaaccccccnctnaaagggggnc

SEQ ID NO: 323 - DNA, 1116 bp, Homo sapiens
  misc_feature (740)..(740): n is a, c, g, or t
  misc_feature (747)..(747): n is a, c, g, or t
  misc_feature (796)..(796): n is a, c, g, or t
  misc_feature (810)..(810): n is a, c, g, or t
  misc_feature (819)..(819): n is a, c, g, or t
  misc_feature (837)..(837): n is a, c, g, or t
  misc_feature (862)..(862): n is a, c, g, or t
  misc_feature (870)..(870): n is a, c, g, or t
  misc_feature (881)..(881): n is a, c, g, or t
  misc_feature (891)..(891): n is a, c, g, or t
  misc_feature (907)..(907): n is a, c, g, or t
  misc_feature (909)..(909): n is a, c, g, or t
  misc_feature (930)..(930): n is a, c, g, or t
  misc_feature (935)..(935): n is a, c, g, or t
  misc_feature (942)..(942): n is a, c, g, or t
  misc_feature (962)..(962): n is a, c, g, or t
  misc_feature (965)..(965): n is a, c, g, or t
  misc_feature (972)..(972): n is a, c, g, or t
  misc_feature (974)..(974): n is a, c, g, or t
  misc_feature (990)..(990): n is a, c, g, or t
  misc_feature (996)..(996): n is a, c, g, or t
  misc_feature (1000)..(1000): n is a, c, g, or t
  misc_feature (1004)..(1004): n is a, c, g, or t
  misc_feature (1007)..(1007): n is a, c, g, or t
  misc_feature (1009)..(1009): n is a, c, g, or t
  misc_feature (1014)..(1014): n is a, c, g, or t
  misc_feature (1021)..(1023): n is a, c, g, or t
  misc_feature (1026)..(1026): n is a, c, g, or t
  misc_feature (1042)..(1042): n is a, c, g, or t
  misc_feature (1067)..(1068): n is a, c, g, or t
  misc_feature (1075)..(1075): n is a, c, g, or t
  misc_feature (1077)..(1077): n is a, c, g, or t
  misc_feature (1097)..(1097): n is a, c, g, or t
  misc_feature (1108)..(1108): n is a, c, g, or t
  misc_feature (1115)..(1115): n is a, c, g, or t
gcccacgcgtccggctgccgccatacgcgctctccctgtttagttatggcagagaacgatgtggacaatgagctcttggactatgaagatgatgaggtggagacagcagctgggggagatggggctgaggcccctgccaagaaggatgtcaagggctcctatgtctccatccacagctctggctttcgtgacttcctgctcaagccagagttgctccgggccattgtcgactgtggctttgagcatccgtcagaagtccagcatgagtgcatccctcaggccattctgggaatggatgtcctgtgccaggccaagtcgggcatgggaaagacagcagtgtttgtcttggccacactgcaacagctggagccagttactgggcaggtgtctgtgctggtgatgtgtcacactcgggagttggcttttcagatcagcaaggaatatgagcgcttctctaaatacatgcccaatgtcaaggttgctgttttttttggtggtctgtctatcaagaaggatgaagaggtgctgaagaagaactgcccgcatatcgtcgtggggactccaggccgtatcctagccctggctcgaaataagagcctcaacctcaaacacattaaacactttattttggatgaatgtgataagatgcttgaacagctcgacatgcgtcgggatgtccaggaaatttttcgcatgaccccccacgagaagcaggtcatgatgttcagtgctaccttgancaaaganatccgtccagtctgccgcaagttcatgcaagatccaatggaaatcttcntggatgatgaaacnaaattgacnctgcatgggttgcaccantactacgtgaaactgaaggacaacnaaaaaaanccggaagctcntttgaccttnctggaatgtccttgantncaccaggtggggatctttgtnaaatntgtgcancggtgcattgccttggcccnacntactaangnaacaaaaacttcccancccatngccntccnccngngggangccccannnagnaaaagcttttcccggnaatcaccaatttaaaaaattttcannaacaaantntttggggctacccaaccctntttggcccaangcatggna

SEQ ID NO: 324 - DNA, 1129 bp, Homo sapiens
  misc_feature (690)..(690): n is a, c, g, or t
  misc_feature (743)..(743): n is a, c, g, or t
  misc_feature (745)..(745): n is a, c, g, or t
  misc_feature (772)..(772): n is a, c, g, or t
  misc_feature (781)..(781): n is a, c, g, or t
  misc_feature (791)..(791): n is a, c, g, or t
  misc_feature (814)..(814): n is a, c, g, or t
  misc_feature (817)..(817): n is a, c, g, or t
  misc_feature (832)..(832): n is a, c, g, or t
  misc_feature (860)..(860): n is a, c, g, or t
  misc_feature (867)..(867): n is a, c, g, or t
  misc_feature (896)..(896): n is a, c, g, or t
  misc_feature (899)..(899): n is a, c, g, or t
  misc_feature (902)..(902): n is a, c, g, or t
  misc_feature (922)..(922): n is a, c, g, or t
  misc_feature (931)..(931): n is a, c, g, or t
  misc_feature (943)..(943): n is a, c, g, or t
  misc_feature (957)..(957): n is a, c, g, or t
  misc_feature (978)..(978): n is a, c, g, or t
  misc_feature (985)..(985): n is a, c, g, or t
  misc_feature (992)..(992): n is a, c, g, or t
  misc_feature (996)..(996): n is a, c, g, or t
  misc_feature (998)..(999): n is a, c, g, or t
  misc_feature (1019)..(1019): n is a, c, g, or t
  misc_feature (1052)..(1054): n is a, c, g, or t
  misc_feature (1065)..(1065): n is a, c, g, or t
  misc_feature (1068)..(1068): n is a, c, g, or t
  misc_feature (1071)..(1071): n is a, c, g, or t
  misc_feature (1078)..(1078): n is a, c, g, or t
  misc_feature (1084)..(1084): n is a, c, g, or t
  misc_feature (1086)..(1086): n is a, c, g, or t
  misc_feature (1095)..(1096): n is a, c, g, or t
  misc_feature (1111)..(1111): n is a, c, g, or t
  misc_feature (1118)..(1118): n is a, c, g, or t
  misc_feature (1123)..(1123): n is a, c, g, or t
gggggtctcagagcagaccacctgccaggaagtggtcatcgcactagcccaagcaataggccagactggccgctttgtgcttgtgcagcggcttcgggagaaggagcggcagttgctgccacaagagtgtccagtgggcgcccaggccacctgcggacagtttgccagcgatgtccagtttgtcctgaggcgcacagggcccagcctagctgggaggccctcctcagacagctgtccacccccggaacgctgcctaattcgtgccagcctccctgtaaagccacgggctgcgctgggctgtgagccccgcaaaacactgacccccgagccagcccccagcctctcacgccctgggcctgcggcccctgtgacacccacaccaggctgctgcacagacctgcggggcctggagctcagagtgcagaggaatgctgaggagctgggccatgaggccttctgggagcaagagctgcgccgggagcaggcccgggagcgagagggacaggcacgcctgcaggcactaagtgcggccactgctgagcatgccgcccggctgcaggccctggacgctcaggcccgtgccctggaggctgagctgcagctggcagcggaggcccctgggcccccctcacctatggcatctgccactgagcgcctgcaccaggacctggctgttcaggagcggcaaantgcggaggtgcagggcagcctggctctggtgagccgggccctggaggcagcanancgagccttgcaggctcaggctcagganctggaaganctgaaccganagctccgtcagtgcaacctgcancanttcatccagcaaacnggggctgcgctgccaccgcccccacggnctgaaangggcccctcttggaactcaggttcggaantgnttnttggggggaagcctgggaangttaaaganccttggcccaanccccaattccaaanttgaatttcccaaacccaaanggggccnttttgcnttcnanncaaaaaaagaaattcccctncctggggggccctcccctttgaaatccccatgnnngggggcccaanccntangcccccnaaaggnantttttttgnncccccaccctccccntgggggnaaccngggccc

SEQ ID NO: 325 - DNA, 1112 bp, Homo sapiens
  misc_feature (737)..(737): n is a, c, g, or t
  misc_feature (765)..(765): n is a, c, g, or t
  misc_feature (767)..(767): n is a, c, g, or t
  misc_feature (826)..(826): n is a, c, g, or t
  misc_feature (833)..(833): n is a, c, g, or t
  misc_feature (888)..(888): n is a, c, g, or t
  misc_feature (899)..(899): n is a, c, g, or t
  misc_feature (912)..(912): n is a, c, g, or t
  misc_feature (915)..(915): n is a, c, g, or t
  misc_feature (917)..(917): n is a, c, g, or t
  misc_feature (919)..(919): n is a, c, g, or t
  misc_feature (935)..(935): n is a, c, g, or t
  misc_feature (939)..(939): n is a, c, g, or t
  misc_feature (960)..(960): n is a, c, g, or t
  misc_feature (962)..(962): n is a, c, g, or t
  misc_feature (969)..(969): n is a, c, g, or t
  misc_feature (984)..(984): n is a, c, g, or t
  misc_feature (986)..(986): n is a, c, g, or t
  misc_feature (991)..(991): n is a, c, g, or t
  misc_feature (1002)..(1002): n is a, c, g, or t
  misc_feature (1016)..(1016): n is a, c, g, or t
  misc_feature (1021)..(1021): n is a, c, g, or t
  misc_feature (1039)..(1039): n is a, c, g, or t
  misc_feature (1046)..(1046): n is a, c, g, or t
  misc_feature (1048)..(1048): n is a, c, g, or t
  misc_feature (1054)..(1055): n is a, c, g, or t
  misc_feature (1062)..(1062): n is a, c, g, or t
  misc_feature (1065)..(1065): n is a, c, g, or t
  misc_feature (1068)..(1068): n is a, c, g, or t
  misc_feature (1070)..(1070): n is a, c, g, or t
  misc_feature (1074)..(1074): n is a, c, g, or t
  misc_feature (1077)..(1077): n is a, c, g, or t
  misc_feature (1082)..(1082): n is a, c, g, or t
  misc_feature (1084)..(1084): n is a, c, g, or t
  misc_feature (1094)..(1094): n is a, c, g, or t
  misc_feature (1104)..(1104): n is a, c, g, or t
gcccacgcgtccggcggtacccgtccgcatacgaatctagcccgggaaccgagttgcgggagtgcggtctgtgccgttccggccaggagtttgccgactgcagacgtcctgcgaaccggcaagatgtgctctctggggttgttccctcctccaccgcctcggggtcaagtcaccctatatgagcacaataacgagctggtgacgggcagtagctatgagagcccgccccccgacttccggggccagtggatcaatcttcctgtcctacaactgacaaaggatcccctaaagacccctggaaggctggaccatggcacaagaactgccttcatccatcaccgggagcaagtgtggaagagatgcatcaacatttggcgtgatgtgggcctttttggggtgctaaatgaaattgcaaactcagaagaagaggtgtttgagtgggtgaagacggcatccggctgggccctggcactctgtcgatgggcctcttccctccatgggtccctgttcccccatctgtctctcaggagcgaagatctgatcgctgaatttgcccaagtcacaaattggtccagctgctgcttgcgtgtctttgcatggcacccccacaccaacaagtttgcagtggccctgctagatgactcagtccgtgtgtataatgccagcagcaccatagtcccctccctgaagcaccggctgcagcgaaatgtggcgtctctggcctggaagccccttantgcctctgtcttggctgtggcctgccananctgcattcttatctggaccctggaaccctacctccttgtctacccgaccctcttctggntgtgccnaagtgctgtctcaccctgggcatacacctgttaccagcttggcctgggcccccantgggggggggntgctctcacttcnccngngnatgctgctatccggtntggnatgtcccaacaaaaaactggntnccccctnccctggtttcaagangnggggngaacaacctgntctggtccccaaanggaanaaaatcctggtacactcnttcactntntttcannttggaanccnaantngganttngaaangngccatttttnggggcctttnaatggttt

SEQ ID NO: 326 - DNA, 687 bp, Homo sapiens
  misc_feature (1)..(1): n is a, c, g, or t
  misc_feature (3)..(3): n is a, c, g, or t
  misc_feature (6)..(6): n is a, c, g, or t
  misc_feature (8)..(8): n is a, c, g, or t
  misc_feature (137)..(137): n is a, c, g, or t
  misc_feature (336)..(336): n is a, c, g, or t
  misc_feature (365)..(365): n is a, c, g, or t
  misc_feature (395)..(395): n is a, c, g, or t
  misc_feature (402)..(402): n is a, c, g, or t
  misc_feature (418)..(418): n is a, c, g, or t
  misc_feature (439)..(439): n is a, c, g, or t
  misc_feature (444)..(444): n is a, c, g, or t
  misc_feature (448)..(448): n is a, c, g, or t
  misc_feature (460)..(460): n is a, c, g, or t
  misc_feature (465)..(465): n is a, c, g, or t
  misc_feature (502)..(502): n is a, c, g, or t
  misc_feature (509)..(509): n is a, c, g, or t
  misc_feature (511)..(511): n is a, c, g, or t
  misc_feature (513)..(513): n is a, c, g, or t
  misc_feature (544)..(544): n is a, c, g, or t
  misc_feature (557)..(557): n is a, c, g, or t
  misc_feature (571)..(571): n is a, c, g, or t
  misc_feature (585)..(585): n is a, c, g, or t
  misc_feature (592)..(592): n is a, c, g, or t
  misc_feature (614)..(614): n is a, c, g, or t
  misc_feature (620)..(621): n is a, c, g, or t
  misc_feature (624)..(624): n is a, c, g, or t
  misc_feature (629)..(629): n is a, c, g, or t
  misc_feature (639)..(639): n is a, c, g, or t
  misc_feature (641)..(641): n is a, c, g, or t
  misc_feature (644)..(644): n is a, c, g, or t
  misc_feature (649)..(649): n is a, c, g, or t
  misc_feature (652)..(652): n is a, c, g, or t
  misc_feature (656)..(656): n is a, c, g, or t
  misc_feature (663)..(666): n is a, c, g, or t
  misc_feature (668)..(668): n is a, c, g, or t
  misc_feature (672)..(672): n is a, c, g, or t
  misc_feature (687)..(687): n is a, c, g, or t
ntnggngnaattactatgagaggatcgcatcaccattcaccatcacgggatcctatttaggtgacacttatagaatcgtcgacccacgcgttccggtcctcaccgcaatggcggctgtgagggccctggtggcctcnaggctcgctgcggcatctgcattcacgtccctgtcccccggcggtcggacgccttcccagcgcgcagcccttcacctctccgtgccgcgccccgcggccagggtcgcgctggtgctgtctggatgcggagtctacaatgggaccgagatccacgaggcctcggcgatcctggtgcacctgagccgtggaggggctgaantccagatctttgctcctgacgtccctcanatgcacgtgattgaccacaccaaggggcanccgtccnaaggcgaaagcaggantgttttgaccgaatctgcgangatcncccntggcaaaatcanagacntggccaacctcagtgtcaaccaaccatgatgctgccntctttcnangnaggctttggagcggttaaaaacctgagcacntttgccgtgcgangggaaacattgcanggtgaataaagaantggaacntgtccagaaggaattccaaccnagccgnnaancccancggactctgngntgnattgncancctntccatcnnnngncaanggtgatcagatatcn

SEQ ID NO: 327 - DNA, 801 bp, Homo sapiens
  misc_feature (1)..(3): n is a, c, g, or t
  misc_feature (7)..(7): n is a, c, g, or t
  misc_feature (15)..(15): n is a, c, g, or t
  misc_feature (19)..(19): n is a, c, g, or t
  misc_feature (44)..(44): n is a, c, g, or t
  misc_feature (54)..(54): n is a, c, g, or t
  misc_feature (61)..(61): n is a, c, g, or t
  misc_feature (67)..(67): n is a, c, g, or t
  misc_feature (80)..(80): n is a, c, g, or t
  misc_feature (87)..(87): n is a, c, g, or t
  misc_feature (92)..(92): n is a, c, g, or t
  misc_feature (94)..(94): n is a, c, g, or t
  misc_feature (126)..(126): n is a, c, g, or t
  misc_feature (226)..(226): n is a, c, g, or t
  misc_feature (228)..(228): n is a, c, g, or t
  misc_feature (233)..(233): n is a, c, g, or t
  misc_feature (295)..(295): n is a, c, g, or t
  misc_feature (312)..(312): n is a, c, g, or t
  misc_feature (377)..(377): n is a, c, g, or t
  misc_feature (565)..(565): n is a, c, g, or t
  misc_feature (603)..(603): n is a, c, g, or t
  misc_feature (614)..(614): n is a, c, g, or t
  misc_feature (617)..(617): n is a, c, g, or t
  misc_feature (619)..(619): n is a, c, g, or t
  misc_feature (621)..(621): n is a, c, g, or t
  misc_feature (627)..(627): n is a, c, g, or t
  misc_feature (636)..(636): n is a, c, g, or t
  misc_feature (639)..(639): n is a, c, g, or t
  misc_feature (662)..(662): n is a, c, g, or t
  misc_feature (678)..(678): n is a, c, g, or t
  misc_feature (681)..(681): n is a, c, g, or t
  misc_feature (683)..(684): n is a, c, g, or t
  misc_feature (686)..(686): n is a, c, g, or t
  misc_feature (695)..(695): n is a, c, g, or t
  misc_feature (701)..(702): n is a, c, g, or t
  misc_feature (723)..(723): n is a, c, g, or t
  misc_feature (731)..(732): n is a, c, g, or t
  misc_feature (734)..(734): n is a, c, g, or t
  misc_feature (750)..(750): n is a, c, g, or t
  misc_feature (756)..(756): n is a, c, g, or t
  misc_feature (768)..(769): n is a, c, g, or t
  misc_feature (795)..(795): n is a, c, g, or t
nnnaatngagaaatnactntgagaggatcgcatctccctctccntctcgggatnttatttnggtganactatataatcgncgacccncgcgntncgaacagcgggaacgctacaagagcgatccanggcccataagagcaacagcacccatgtggcgctgcagccgaatcatgcacatgcagcgagagctccaccccacccttctgtcttccctggaaggcatcgncnatcanatggtctggttcagagaaaattggcatgaagaggttctcaggcagctccaacagggcctggngaaatgttactccgtgncgtttgagaaaagtggagcggtgtccgatgctaaaatcaccccccacactctcaattttgtgaanaagttggtgagcacgtttggggtgggcctggagaatgtgtccaacgtctcgaccatgttctccagcgcagcctctgagtctctggcccggcgggcgcaggccactgcacaagaccctgtctttcagaaactgaaaggccagttcacgacggattttgacttcagcgttccaggatccatgaagcttcntaatcttatttctaagtttgaaaaagtggatcaaaatnttggaggccangancnancaactncccaaattnttnctcataaaagaaaaagtgccggntcttgaatcaattttntcngnncnagacagctnaaagtnnaaaattcctggggagttttcntgatgccnnancccaaacgcattattnacttcnagaattgccccnntttcatgcccccgggttaaaaaattnttgcat

SEQ ID NO: 328 - DNA, 1093 bp, Homo sapiens
  misc_feature (727)..(727): n is a, c, g, or t
  misc_feature (842)..(842): n is a, c, g, or t
  misc_feature (855)..(855): n is a, c, g, or t
  misc_feature (871)..(871): n is a, c, g, or t
  misc_feature (878)..(878): n is a, c, g, or t
  misc_feature (896)..(896): n is a, c, g, or t
  misc_feature (920)..(920): n is a, c, g, or t
  misc_feature (937)..(937): n is a, c, g, or t
  misc_feature (953)..(953): n is a, c, g, or t
  misc_feature (955)..(955): n is a, c, g, or t
  misc_feature (960)..(960): n is a, c, g, or t
  misc_feature (965)..(965): n is a, c, g, or t
  misc_feature (968)..(969): n is a, c, g, or t
  misc_feature (989)..(989): n is a, c, g, or t
  misc_feature (1001)..(1001): n is a, c, g, or t
  misc_feature (1008)..(1008): n is a, c, g, or t
  misc_feature (1010)..(1011): n is a, c, g, or t
  misc_feature (1025)..(1025): n is a, c, g, or t
  misc_feature (1030)..(1030): n is a, c, g, or t
  misc_feature (1036)..(1036): n is a, c, g, or t
  misc_feature (1041)..(1043): n is a, c, g, or t
  misc_feature (1046)..(1046): n is a, c, g, or t
  misc_feature (1061)..(1062): n is a, c, g, or t
  misc_feature (1072)..(1072): n is a, c, g, or t
  misc_feature (1082)..(1083): n is a, c, g, or t
  misc_feature (1088)..(1088): n is a, c, g, or t
gcaggagcaaatgataaactgaaatggtgtttgcgagtaaaccccaaagggttagatgaagaaagcaaagattacctgtcactttacctgttactggtcagctgtccaaagagtgaagttcgggcaaaattcaaattctccatcctgaatgccaagggagaagaaaccaaagctatggagagtcaacgggcatataggtttgtgcaaggcaaagactggggattcaagaaattcatccgtagagattttcttttggatgaggccaacgggcttctccctgatgacaagcttaccctcttctgcgaggtgagtgttgtgcaagattctgtcaacatttctggccagaataccatgaacatggtaaaggttcctgagtgccggctggcagatgagttaggaggactgtgggagaattcccggttcacagactgctgcttgtgtgttgccggccaggaattccaggctcacaaggctatcttagcagctcgttctccggtttttagtgccatgtttgaacatgaaatggaggagagcaaaaagaatcgagttgaaatcaatgatgtggagcctgaagtttttaaggaaatgatgtgcttcatttacacggggaaggctccaaacctcgacaaaatggctgatgatttgctggcagctgctgacaagtatgccctggagcgcttaaaaggtcatgtgtgaggatgccctctgcagtaacctgtccgtgganaacgctgcagaaattctcatcctggccgacctccacagtgcagatcagttgaaaactcaggcagtggattttcatcaactatcatgcttcggatgtcttggaaaacctctggggnggaagtcaatggnggtgtcccattccccncttgggnggcctgaagcaatacccnctccccggcttcacacagtgcccntttttctgggacccccncgcaaaccccctgaancnatccntaaanccnngcttggttgaaaaacccccntttaatttcccnaaaaccncnncccccctgtttgcngcccnctgganccccnnngtnaaaaggcccaatctnnggaacttttnctctgtttgnnaaggnaaaaa

SEQ ID NO: 329 - DNA, 1088 bp, Homo sapiens
  misc_feature (773)..(773): n is a, c, g, or t
  misc_feature (835)..(835): n is a, c, g, or t
  misc_feature (873)..(873): n is a, c, g, or t
  misc_feature (876)..(876): n is a, c, g, or t
  misc_feature (883)..(883): n is a, c, g, or t
  misc_feature (896)..(896): n is a, c, g, or t
  misc_feature (898)..(898): n is a, c, g, or t
  misc_feature (901)..(901): n is a, c, g, or t
  misc_feature (908)..(908): n is a, c, g, or t
  misc_feature (916)..(916): n is a, c, g, or t
  misc_feature (923)..(923): n is a, c, g, or t
  misc_feature (925)..(925): n is a, c, g, or t
  misc_feature (941)..(941): n is a, c, g, or t
  misc_feature (953)..(953): n is a, c, g, or t
  misc_feature (967)..(967): n is a, c, g, or t
  misc_feature (970)..(970): n is a, c, g, or t
  misc_feature (987)..(987): n is a, c, g, or t
  misc_feature (1000)..(1000): n is a, c, g, or t
  misc_feature (1003)..(1003): n is a, c, g, or t
  misc_feature (1005)..(1005): n is a, c, g, or t
  misc_feature (1019)..(1019): n is a, c, g, or t
  misc_feature (1024)..(1024): n is a, c, g, or t
  misc_feature (1034)..(1035): n is a, c, g, or t
  misc_feature (1038)..(1038): n is a, c, g, or t
  misc_feature (1045)..(1045): n is a, c, g, or t
  misc_feature (1047)..(1047): n is a, c, g, or t
  misc_feature (1057)..(1057): n is a, c, g, or t
  misc_feature (1063)..(1063): n is a, c, g, or t
  misc_feature (1087)..(1087): n is a, c, g, or t
gaatatgtaaaaactatgttacggaatggttatgctcctgttgaatttttcctcgaagggacaagaagccgctctgccaagacattgactcctaaatttggtcttctgaatattgtgatggagccattttttaaaagagaagtttttgatacctaccttgtcccaattagtatcagttatgataagatcttggaagaaactctttatgtgtatgagcttctaggggttcctaaaccaaaagaatctacaactgggttgctgaaagccagaaagattctctctgaaaattttggaagcatccatgtgtactttggagatcctgtgtcacttcgatctttggcagctgggaggatgagtcggagctcatataacttggttccaagatacattcctcagaaacagtctgaggacatgcatgcctttgtcactgaagttgcctacaaaatggagcttctgcaaattgaaaacatggttttgagcccctggaccctaatagttgctgttctgcttcagaaccggccatccatggactttgatgctctggtggaaaagactttatggctaaaaggcttaacccaggcatttggagggtttctcatttggcctgataataaacctgctgaagaagttgtcccggccagcattcttctgcattccaacattgccagccttgtcaaagaccaggtgattctgaaagtggactccggagactcggaagtggtcgatgggcttatgctccagcacatcactctcctcatgtgctcagcttatanggaaccagctgctcaacatttttgtgcgcccatccttagtagcagtagcattgcaaatgacnccagggttcaggaaagaggatgtctacagttgctttcnctncctacgngatgtttttgcananganttcctcntccttccnggaaacncnctaaaggactttgaanaaggctgttacntgctttgtaaaagnganccctacaagtgactacnaaagacctcctanttncnaaaaaaggaaaacngggtnaaaattttannagnacccttnancctttggggnaagctnccaaaaatttgcagaacctttggng

SEQ ID NO: 330 - DNA, 1107 bp, Homo sapiens
  misc_feature (701)..(701): n is a, c, g, or t
  misc_feature (748)..(748): n is a, c, g, or t
  misc_feature (775)..(775): n is a, c, g, or t
  misc_feature (780)..(780): n is a, c, g, or t
  misc_feature (795)..(795): n is a, c, g, or t
  misc_feature (805)..(805): n is a, c, g, or t
  misc_feature (860)..(860): n is a, c, g, or t
  misc_feature (867)..(867): n is a, c, g, or t
  misc_feature (891)..(891): n is a, c, g, or t
  misc_feature (917)..(917): n is a, c, g, or t
  misc_feature (920)..(920): n is a, c, g, or t
  misc_feature (928)..(928): n is a, c, g, or t
  misc_feature (933)..(933): n is a, c, g, or t
  misc_feature (967)..(967): n is a, c, g, or t
  misc_feature (973)..(973): n is a, c, g, or t
  misc_feature (976)..(976): n is a, c, g, or t
  misc_feature (979)..(979): n is a, c, g, or t
  misc_feature (993)..(993): n is a, c, g, or t
  misc_feature (996)..(996): n is a, c, g, or t
  misc_feature (1025)..(1025): n is a, c, g, or t
  misc_feature (1027)..(1027): n is a, c, g, or t
  misc_feature (1033)..(1033): n is a, c, g, or t
  misc_feature (1036)..(1036): n is a, c, g, or t
  misc_feature (1040)..(1040): n is a, c, g, or t
  misc_feature (1045)..(1045): n is a, c, g, or t
  misc_feature (1049)..(1049): n is a, c, g, or t
  misc_feature (1056)..(1056): n is a, c, g, or t
  misc_feature (1062)..(1062): n is a, c, g, or t
  misc_feature (1065)..(1065): n is a, c, g, or t
  misc_feature (1068)..(1068): n is a, c, g, or t
  misc_feature (1072)..(1072): n is a, c, g, or t
  misc_feature (1077)..(1077): n is a, c, g, or t
  misc_feature (1080)..(1080): n is a, c, g, or t
  misc_feature (1090)..(1090): n is a, c, g, or t
  misc_feature (1092)..(1092): n is a, c, g, or t
  misc_feature (1101)..(1101): n is a, c, g, or t
  misc_feature (1103)..(1103): n is a, c, g, or t
gagaagttctatgcgaagatgctcgccaagaggctcgtccaccagaacagtgcaagtgacgatgccgaagccagcatgatctccaagttaaagcaagcttgcgggttcgagtacacctctaaacttcagcgcatgtttcaagacattggcgtgagcaaagatctgaacgagcaattcaaaaagcacttgacaaactcagaacccctagacttggatttcagcattcaagtgctgagctccgggtcctggcccttccagcagtcttgtacatttgccttgccgtcagagttggaacgtagttatcagcgattcacagctttctacgccagccgccacagtggccgaaaattgacgtggttatatcagttgtctaaaggagaattggtaactaactgcttcaaaaacagatatactttgcaggcgtcgacattccagatggctatcctgcttcagtacaacacggaagatgcctacactgtgcagcagctgaccgacagcactcaaattaaaatggacattttggcgcaagttttacagattttattaaagtcgaagctattggtcttggaagatgaaaatgcaaatgttgatgaggtggaattgaagccagataccttaataaaattatatcttggttataaaaataagaaattaagggttaacatcaatgtgccaatgaaaaccgaacagaagcaggaacnaagaaaccacacacaaaaacatcgaggaagaccgcaaactactgatncaggcggccatcgtgagaatcatgaanatgangaaggttctgaaacnccagccagtnacttggcgaggtcctcactcagctgtcctccaggttcaaacctcgagtccctggngatcaanaaatgcattgacattctaattganaaaagaatatttggagcgaggggaanggngaaaaggnaaccntacggttactgggcttaacccttttgggaaaggncctgantgngtnaacccccaccaaanaanttcatgttgggaaaaaaatgaaaaaaacncnaagttntanaacnacccncccngcccccnttgganccnccntttnaaaantgnaaaccaaaancncccccccancngggc

SEQ ID NO: 331 - DNA, 784 bp, Homo sapiens
  misc_feature (639)..(639): n is a, c, g, or t
  misc_feature (648)..(648): n is a, c, g, or t
  misc_feature (674)..(674): n is a, c, g, or t
  misc_feature (678)..(678): n is a, c, g, or t
  misc_feature (687)..(687): n is a, c, g, or t
  misc_feature (721)..(721): n is a, c, g, or t
  misc_feature (723)..(723): n is a, c, g, or t
  misc_feature (732)..(732): n is a, c, g, or t
  misc_feature (741)..(741): n is a, c, g, or t
  misc_feature (753)..(754): n is a, c, g, or t
  misc_feature (761)..(761): n is a, c, g, or t
  misc_feature (763)..(763): n is a, c, g, or t
  misc_feature (765)..(765): n is a, c, g, or t
  misc_feature (768)..(769): n is a, c, g, or t
  misc_feature (775)..(775): n is a, c, g, or t
  misc_feature (780)..(780): n is a, c, g, or t
  misc_feature (783)..(784): n is a, c, g, or t
ggcactgtggtggtcccaggagacagtgacctagagctctgccgtgcccacattgagagactccagcaggagcccgatggtgctggagccaagtccccgacatgccagaaactgtcccccaagtggtgcttcctggacgccaccactgccagccgcttctacaggatcgaccgagcccaggagcacctcaactatgtgactgagatcgcacaggatgagatttatatcctggaccctgagctgctgggggcatcggcccggcctgacctcccaacccccacttcccctctccccacctcaccctgctcacccacgccccggtcactgcaaggggatgctgcaccccctcaaggtgaagagctgattgaggctgccaagaggaacgacttctgtaagctccaggagctgcaccgagctgggggcgacctcatgcaccgagacgagcagagtcgcacgctcctgcaccacgcagtcagcactggcagcaaggatgtggtccgctacctgctggaccacgcccccccagagatccttgatgcggtggaggaaaacggggagacctgtttgcaccaagcagcggccctgggccagcgcaccatctgccactacatcgtggaggccggggcctcgctcatgaanacagaccancagggcgacactccccggcagcgggntganaaggctcangacaccgagctggccgcctacctggagaaccggnancactaccanatgatccancgggaggaccannaaacggntntntanngggccncccanggnn

SEQ ID NO: 332 - DNA, 1044 bp, Homo sapiens
  misc_feature (882)..(882): n is a, c, g, or t
  misc_feature (885)..(885): n is a, c, g, or t
  misc_feature (892)..(892): n is a, c, g, or t
  misc_feature (908)..(908): n is a, c, g, or t
  misc_feature (915)..(915): n is a, c, g, or t
  misc_feature (918)..(918): n is a, c, g, or t
  misc_feature (934)..(934): n is a, c, g, or t
  misc_feature (941)..(941): n is a, c, g, or t
  misc_feature (945)..(945): n is a, c, g, or t
  misc_feature (952)..(952): n is a, c, g, or t
  misc_feature (957)..(957): n is a, c, g, or t
  misc_feature (986)..(986): n is a, c, g, or t
  misc_feature (991)..(991): n is a, c, g, or t
  misc_feature (1008)..(1008): n is a, c, g, or t
  misc_feature (1010)..(1012): n is a, c, g, or t
  misc_feature (1015)..(1015): n is a, c, g, or t
  misc_feature (1025)..(1025): n is a, c, g, or t
  misc_feature (1028)..(1028): n is a, c, g, or t
  misc_feature (1034)..(1035): n is a, c, g, or t
  misc_feature (1040)..(1040): n is a, c, g, or t
gggtccaatgagcgggtcatgggttgggtgtccgggctgggcctgaaggaatttgccacgaacctcacggagagcggggtacacggggcactgctcgccctggacgagaccttcgactactccgacctggccttgctcctgcagatccccacgcagaatgcacaggcccggcagcttctggagaaggaattcagcaaccttatctccttaggcacagacaggcggctggacgaggacagcgccaagtctttcagccgctccccatcctggcggaagatgttccgggagaaggacctccgaggcgtaactcccgactcagctgagatgttgccccccaactttcgttcggctgcagcgggagccctgggctctccggggctccctctccgcaagctgcagccagaaggccagacttctgggagttcccgggcagacggcgtttcggtccggacctattcctgctagtgcaggcctccaggtgacctcactcggacggaagaatcttcccgaggctgggctgttccctctcctgcccggactgtggcctcgccggggagagcgggcgggggagctcgcgccgaggactggaccatctgtacagaccagcgggagtgcgcgcgcccgcctcgcacagggccggggcctggaccaaaccacatgaactggactgagagggggaagaagcggggaggaagaaatcccgccccaaacgtccgctttccttttctctactttgtaatttattgatcagtttctgttgggagacgggtgtcctttacccgcgggaagggggcggggcttccctcccgggccgcatgcggggagaggctgctccctcccctttttcctgcccagtcgcggggcccaagtcttccttcttcntcnaaagganggggaggggggactcnctgctanaancctcgccccctgtgcnattcaantccncccgccncgtcnggtcgccggtccccgggtcatctgggggnggttncccctcccctccccggntnnnggnccccgggccnccncccccnnggttnggcc

SEQ ID NO: 333 - DNA, 664 bp, Homo sapiens
  misc_feature (496)..(496): n is a, c, g, or t
  misc_feature (520)..(520): n is a, c, g, or t
  misc_feature (534)..(534): n is a, c, g, or t
  misc_feature (551)..(551): n is a, c, g, or t
  misc_feature (561)..(561): n is a, c, g, or t
  misc_feature (589)..(589): n is a, c, g, or t
  misc_feature (592)..(592): n is a, c, g, or t
  misc_feature (615)..(616): n is a, c, g, or t
  misc_feature (620)..(620): n is a, c, g, or t
  misc_feature (622)..(622): n is a, c, g, or t
  misc_feature (630)..(630): n is a, c, g, or t
  misc_feature (632)..(632): n is a, c, g, or t
  misc_feature (635)..(635): n is a, c, g, or t
  misc_feature (642)..(642): n is a, c, g, or t
  misc_feature (651)..(653): n is a, c, g, or t
  misc_feature (657)..(662): n is a, c, g, or t
ggcctcgagtttggaagaaaacaaggcagtagtaaggaggaacaggaaaggaagaggctgatccacaaacacaagcgtgaatttaaaggggccgttcgagaaatccgcaaggacaatcagttcctggcgaggatgcaactctcagaaatcatggaacgggatgcggaaagaaagcggaaagtaaagcagctttttaacagcctggctacacaggaaggcgaatggaaggctctgaagaggaaaaagttcaaaaaataaattacattttataaataaggcaaggaactggacattacctcacatctgcaattccaaccctctgggaggccaaggcaggaggattgcttcagcccgggagttcgagaccagcctgggcaacacaggaagaccccgtctctaccagaaaaacataaaaattagccaagtgtggtggcacgcacctgtggtcccaactactcgggaggctgaagcaggaggactgcttgagctgagtccnaggttacagtgagccgtgattganccactgcactccancctcggccacagtgcangactgtgtcncttaaaaaaaaatttttttttttttganacngaatttttgctcttgttgcccannctgnantgcactgncncanccttccncctccctgnnnttcnnnnnnat

SEQ ID NO: 334 - DNA, 1139 bp, Homo sapiens
  misc_feature (682)..(682): n is a, c, g, or t
  misc_feature (773)..(773): n is a, c, g, or t
  misc_feature (776)..(776): n is a, c, g, or t
  misc_feature (782)..(782): n is a, c, g, or t
  misc_feature (830)..(830): n is a, c, g, or t
  misc_feature (878)..(878): n is a, c, g, or t
  misc_feature (893)..(893): n is a, c, g, or t
  misc_feature (903)..(903): n is a, c, g, or t
  misc_feature (924)..(924): n is a, c, g, or t
  misc_feature (933)..(933): n is a, c, g, or t
  misc_feature (950)..(950): n is a, c, g, or t
  misc_feature (958)..(958): n is a, c, g, or t
  misc_feature (960)..(960): n is a, c, g, or t
  misc_feature (966)..(966): n is a, c, g, or t
  misc_feature (975)..(975): n is a, c, g, or t
  misc_feature (980)..(980): n is a, c, g, or t
  misc_feature (1005)..(1005): n is a, c, g, or t
  misc_feature (1007)..(1007): n is a, c, g, or t
  misc_feature (1010)..(1010): n is a, c, g, or t
  misc_feature (1017)..(1017): n is a, c, g, or t
  misc_feature (1025)..(1025): n is a, c, g, or t
  misc_feature (1036)..(1036): n is a, c, g, or t
  misc_feature (1039)..(1039): n is a, c, g, or t
  misc_feature (1046)..(1046): n is a, c, g, or t
  misc_feature (1048)..(1048): n is a, c, g, or t
  misc_feature (1055)..(1055): n is a, c, g, or t
  misc_feature (1058)..(1058): n is a, c, g, or t
  misc_feature (1062)..(1062): n is a, c, g, or t
  misc_feature (1064)..(1064): n is a, c, g, or t
  misc_feature (1070)..(1070): n is a, c, g, or t
  misc_feature (1083)..(1083): n is a, c, g, or t
  misc_feature (1085)..(1085): n is a, c, g, or t
  misc_feature (1088)..(1089): n is a, c, g, or t
  misc_feature (1096)..(1096): n is a, c, g, or t
  misc_feature (1101)..(1101): n is a, c, g, or t
  misc_feature (1104)..(1104): n is a, c, g, or t
  misc_feature (1116)..(1117): n is a, c, g, or t
  misc_feature (1124)..(1124): n is a, c, g, or t
  misc_feature (1128)..(1128): n is a, c, g, or t
  misc_feature (1131)..(1131): n is a, c, g, or t
  misc_feature (1139)..(1139): n is a, c, g, or t
gcccacgcgtccgattctggagaagccggtggacaagcaggacgcctacaggatgctgtcccggttgagtgggagagaacacagcgtgttcacaggtgtcgcgatcgtccactgctccagcaaagaccatcagctggacaccagggtctcggaattctacgaggaaacgaaggtgaagttctcggagctgtccgaggagctgctctgggaatacgtccacagcggggagcccatggacaaagctggcggctacgggatccaggccctgggcggcatgctggtggagtccgtacacggggactttctgaacgtggtgggattcccgctgaaccacttctgcaagcagctggtgaagctctactacccgccccgcccggaggacctgcggcggagtgtcaagcacgactccatcccggccgcggacaccttcgaagacctcagtgacgtggaggggggtggctcggagcccactcagagggacgcgggcagccgcgatgagaaggccgaggcgggagaggcgggacaggccacggcagaggctgagtgtcacaggactcgggagaccctgcctccgttcccgacacgcctcctggagctgattgagggctttatgctatccaagggcctgctcaccgcttgcaaactgaaggtgttcgatttgttaaaagatgaagcaccccanaaggctgcggatattgccagcaaagtggacgcctctgcgtgtggaatggaaaaggcttctggacatctgtgctgccatggggctcctgganaanacagancaaggttacagtaacacagagacagcgaacgtctacctggcatcggantggcgaatactctctgcacggcttcatcatgcacaaaaatgacctcanatggaacctctttanatacctggantttgccatccgaaaaggaaanaaaccaccnccccagggcgtttgggnaaaaaagngnaaaatntttttcaanaatgnttactaacaaaaccccggaaaaccngnctnaagtttnatgcgggnccatgcccggnatnaaaaaantnaattgcnttnccangnggccanggcctttaatttntnccnnttttccnccccntgnaaatgggaggcnncccgggngccntgncccaaaan

SEQ ID NO: 335 - DNA, 878 bp, Homo sapiens
  misc_feature (741)..(741): n is a, c, g, or t
  misc_feature (849)..(849): n is a, c, g, or t
  misc_feature (856)..(878): n is a, c, g, or t
gcggacgcgtgggtggggccccgggcggcgttgaccatgacccagcagggcgcggcgctgcagaactacaacaacgagctggtcaagtgcatagaggagctgtgccagaagcgggaggagctgtgccggcagatccaggaggaggaggacgagaagcagcggctgcagaatgaggtgaggcagctgacagagaagctggcccgcgtcaacgagaacctggcacgcaagattgcctctcgcaacgagttcgaccggaccatcgcggagacggaggccgcctacctcaagatcctggagagctcccagactttgctcagcgttctcaagagggaagctgggaacctgaccaaggctacagccccagaccagaaaagtagcggcggcagggacagctgaccagaccacgggcagggcctgcctccgtgtgcccctcagctcagccccagcaagtgtgtgctcagagcatctttgttcttcacggcagcagctaccttccctcactgtctcaggtgccgagaggggcaggtgccagcctccactggcatcagtgacaagcccagggcacagcccacccgggggtcctcgcttcatgctcacacaggctatggggatggtgggctccaggtcagctctgcaaggggcttgtctctgtggcacccacactcctgccctgccagggaggctctggttgtctgagcaccatgggggccccctcaccttgtccctcctcagccagcagangcccagggcaagggacaggaggacaggggttctccttcaccacagaacccaaacctcaggtctcacccctgtggcctgtgattatgaataaagattatctttgtaaanaaaaaannnnnnnnnnnnnnnnnnnnnnn

SEQ ID NO: 336 - DNA, 936 bp, Homo sapiens
  misc_feature (726)..(726): n is a, c, g, or t
  misc_feature (738)..(738): n is a, c, g, or t
  misc_feature (744)..(744): n is a, c, g, or t
  misc_feature (751)..(751): n is a, c, g, or t
  misc_feature (758)..(758): n is a, c, g, or t
  misc_feature (760)..(760): n is a, c, g, or t
  misc_feature (771)..(771): n is a, c, g, or t
  misc_feature (784)..(784): n is a, c, g, or t
  misc_feature (812)..(812): n is a, c, g, or t
  misc_feature (827)..(827): n is a, c, g, or t
  misc_feature (837)..(837): n is a, c, g, or t
  misc_feature (840)..(840): n is a, c, g, or t
  misc_feature (864)..(864): n is a, c, g, or t
  misc_feature (872)..(872): n is a, c, g, or t
  misc_feature (888)..(888): n is a, c, g, or t
  misc_feature (897)..(899): n is a, c, g, or t
  misc_feature (903)..(903): n is a, c, g, or t
  misc_feature (908)..(908): n is a, c, g, or t
  misc_feature (920)..(920): n is a, c, g, or t
  misc_feature (923)..(923): n is a, c, g, or t
  misc_feature (926)..(926): n is a, c, g, or t
  misc_feature (929)..(929): n is a, c, g, or t
  misc_feature (931)..(931): n is a, c, g, or t
  misc_feature (933)..(933): n is a, c, g, or t
ggatcagcagaggctgcagaggatgatgagatccgcatgatcaatgagttcccccgtgtggccagtgtggcctcctctctggctgcccgtggccctgactcaggcatccagcaggatgcagatggtctgagtgacacatcctgcgaaccacctgcccctgacacctggtataagggccgaaaggcagggctgctgctgccaggtgcaggagccactctctacagagaggaggggcccccagccactgccacagccttcctggggggctgtggcctgagccctgcacccactggggactatggcttcccagcagatggcaagccatgtgtggcaggtgcgctgacagccattgtggccggcgaggaggagctccgtggcagctataactgggactacctgctgagctggtgccctcagttccaaccactggccagtgtcttcacagagatcgctcggctcaaggatgaagctcggccatgtcccccagctccccgtatcgacccaccacccctcatcactgccgtggcccacccaggagccaagtctgtgccccccaagccagcaaacacagctgcagcccgggccatcttcccaccagcttctcaccgctcccccatcagccatgaaggctccctgtcctcagctgccatgtcccccagcttctcaccctctctgtctcctctggctgctcgctcacccgttgtctcaccatttggggtggcccangggtcccctcancctcancactcancgcaaantntggccttgganccacctgatgacncgaagctgcacatctaactgtggcccangctgggcccccaacntgggaatgcncanagtgtccccaacgcaagcccccanttttgaancctgccctggggcaancctccgaannntgantgggntacgggggaagnccnccnccnangnccc

SEQ ID NO: 337 - DNA, 880 bp, Homo sapiens
  misc_feature (193)..(193): n is a, c, g, or t
  misc_feature (846)..(846): n is a, c, g, or t
  misc_feature (860)..(860): n is a, c, g, or t
  misc_feature (870)..(870): n is a, c, g, or t
  misc_feature (880)..(880): n is a, c, g, or t
ggtagcgcccagggcctgcggggcgcaggagagctggagtcaggcggagaccgcaggctgaccccgcagcggccgggctgtcgcggcccccacctcagggtcttattctgttgctcaggctggagtgcaatggcgcgaacacggctcactgcagtctcgatctcgctggactcagagccactggtggccgcanaagacagtccacgtgtcttaaccaggcttacaagactccaaagatgggtgccttgtatcaagcaggtgctcaacaaatgtctgctgaaaaaatgatgcagggtgcggtggctcacgcaggtaaccatgtgcgaccgaaaggccgtgatcaaaaatgcggacatgtcggaagagatgcaacaggactcggtggagtgcgctactcaggcgctggagaaatacaacatagagaaggacattgcggctcatatcaagaaggaatttgacaagaagtacaatcccacctggcattgcatcgtggggaggaacttcggtagttatgtgacacatgaaaccaaacacttcatctacttctacctgggccaagtggccattcttctgttcaaatctggttaaaagcatggactgtgccacacacccagtgatccatccaaaaacaaggactgcagcctaaattccaaataccagagactgaaattttcagccttgctaagggaacatctcgatgtttgaacctttgttgtgttttgtacagggcattctctgtactagtttgtcgtggttataaaacaattagcagaaatagcctacatttggaatttattttctattccaaaacttctgccccacgtttgtttttctctcaaaatccanttcctttaaaaaanaaatcctgantgcaaatgtn

SEQ ID NO: 338 - DNA, 1071 bp, Homo sapiens
  misc_feature (799)..(803): n is a, c, g, or t
  misc_feature (805)..(806): n is a, c, g, or t
  misc_feature (808)..(817): n is a, c, g, or t
  misc_feature (837)..(837): n is a, c, g, or t
  misc_feature (854)..(854): n is a, c, g, or t
  misc_feature (864)..(864): n is a, c, g, or t
  misc_feature (869)..(869): n is a, c, g, or t
  misc_feature (877)..(877): n is a, c, g, or t
  misc_feature (898)..(898): n is a, c, g, or t
  misc_feature (930)..(931): n is a, c, g, or t
  misc_feature (933)..(933): n is a, c, g, or t
  misc_feature (940)..(940): n is a, c, g, or t
  misc_feature (947)..(947): n is a, c, g, or t
  misc_feature (953)..(953): n is a, c, g, or t
  misc_feature (962)..(962): n is a, c, g, or t
  misc_feature (970)..(970): n is a, c, g, or t
  misc_feature (975)..(975): n is a, c, g, or t
  misc_feature (982)..(982): n is a, c, g, or t
  misc_feature (988)..(988): n is a, c, g, or t
  misc_feature (1000)..(1001): n is a, c, g, or t
  misc_feature (1022)..(1022): n is a, c, g, or t
  misc_feature (1035)..(1035): n is a, c, g, or t
  misc_feature (1064)..(1064): n is a, c, g, or t
  misc_feature (1069)..(1069): n is a, c, g, or t
gagctgctggagtgtgtctacctggtgtctgccatgctcctggagatcccctacatggccgcccatgagagcgatgcccgccgacgcatgatcagcaagcagttccaccaccagctgcgcgtgggcgagcgacagcccctgctgggtccccctgagtccatgcgggaacatgtggtcgctgcctccaaggccatgaagatgggtgactggaagacctgtcacagttttatcatcaatgagaagatgaatgggaaagtgtgggaccttttccccgaggctgacaaagtccgcaccatgctggttaggaagatccaggaagagtcactgaggacctacctcttcacctacagcagtgtctatgactccatcagcatggagacgctgtcagacatgtttgagctggatctgcccactgtgcactccatcatcagcaaaatgatcattaatgaggagctgatggcctccctggaccagccaacacagacagtggtgatgcaccgcactgagcccactgcccagcagaacctggctctgcagctggccgagaagctgggcagcctggtggagaacaacgaacgggtgtttgaccacaagcagggcacctacgggggctacttccgagaccagaaggacggctaccgcaaaaacgagggctacatgcgccgcggtggctaccgccagcagcagtctcagacggcctactgagctctccactctgtttcccgcctgggccatccaaccttgaagtcctaaaaccacacctcagtcactaaaaggtctgttttaaagttaaaaaaannnnnannannnnnnnnnnaagggcgggccgctccctanagtggagtcgaattaancttaaattanctgancttggganctcctgttgaaaaaatccagnaaatgaccctccaaaactcccttctggatttnntncaaaaancctcggntgcccncccgggggntttttttnttggnggaaaantcccanctaagctttggnnaaaaattttccgggaccttanggaaacctaaatnggaaaaaaaaatccctgggaatttccccnggttnat

SEQ ID NO: 339 - DNA, 1219 bp, Homo sapiens
  misc_feature (857)..(857): n is a, c, g, or t
  misc_feature (891)..(891): n is a, c, g, or t
  misc_feature (896)..(896): n is a, c, g, or t
  misc_feature (972)..(972): n is a, c, g, or t
  misc_feature (997)..(997): n is a, c, g, or t
  misc_feature (1002)..(1002): n is a, c, g, or t
  misc_feature (1006)..(1006): n is a, c, g, or t
  misc_feature (1019)..(1019): n is a, c, g, or t
  misc_feature (1037)..(1037): n is a, c, g, or t
  misc_feature (1052)..(1052): n is a, c, g, or t
  misc_feature (1056)..(1056): n is a, c, g, or t
  misc_feature (1065)..(1065): n is a, c, g, or t
  misc_feature (1077)..(1077): n is a, c, g, or t
  misc_feature (1084)..(1084): n is a, c, g, or t
  misc_feature (1092)..(1092): n is a, c, g, or t
  misc_feature (1104)..(1104): n is a, c, g, or t
  misc_feature (1125)..(1126): n is a, c, g, or t
  misc_feature (1136)..(1136): n is a, c, g, or t
  misc_feature (1142)..(1142): n is a, c, g, or t
  misc_feature (1150)..(1150): n is a, c, g, or t
  misc_feature (1157)..(1158): n is a, c, g, or t
  misc_feature (1160)..(1162): n is a, c, g, or t
  misc_feature (1173)..(1173): n is a, c, g, or t
  misc_feature (1178)..(1178): n is a, c, g, or t
  misc_feature (1185)..(1185): n is a, c, g, or t
  misc_feature (1193)..(1193): n is a, c, g, or t
  misc_feature (1196)..(1196): n is a, c, g, or t
  misc_feature (1203)..(1203): n is a, c, g, or t
  misc_feature (1206)..(1206): n is a, c, g, or t
  misc_feature (1208)..(1208): n is a, c, g, or t
gggcagaaatgggatcagaaatcacagaaaccccgagactcttcagttgaagttcgtagtgattgggaagtgaaagaggaaatggattttcctcagttgatgaagatgcgctacttggaagtatcagagccacaggacattgagtgttgtggggccctagaatactacgacaaagcctttgaccgcatcaccacgaggagtgagaagccactgcggagcatcaagcgcatcttccacactgtcaccaccacagacgaccctgtcatccgcaagctggcaaaaactcaggggaatgtgtttgccactgatgccatcctggccacgctgatgagctgtacccgctcagtgtattcctgggatattgtcgtccagagagttgggtccaaactcttctttgacaagagagacaactctgactttgcgctgcgcacattgtcagtgactctttgttgcatggtgagtgaccatgccacgcttttgcagacctcctgacagtgagtgagactgccaatgagccccctcaagatgaaggtaattccttcaattcaccccgcaacctggccatggaggcaacctacatcaaccacaatttctcccagcagtgcttgagaatggggaaggaaagatacaacttccccaacccaaacccgtttgtggaggacgacatggataagaatgaaatcgcctctgttgcgtaccgttaccgcaggtggaagcttggagatgatattgaccttattgtccgttgtgagcacgatggcgtcatgactggagccaacggggaagtgtccttcatcaacatcaagacactcaatgagtgggattccaggcactgtaatggcgttgactggcgtcanaagctggactctcagcgaggggctgtcattgccncgganctgaaaaacaacagctacaagttggcccggtggacctgctgtgctttgctggctggatctgaatacctcagctggntatgtgtctcggtacccgtgaaaantcccncgcncgtcatctaggcnccacattcagcctaaganttgcccccaatcacngacngggaaagcnggggatttaccngcccatnaatccgcngaacggggaggnaaaccctcccaagacccaaanngtctcggtcncccccngaggcctnccctttnnannngggaagggggnaaaanaaaaaangaaacttnccnggggggnggntncttcccaaaaa

SEQ ID NO: 340 - DNA, 1141 bp, Homo sapiens
  misc_feature (794)..(794): n is a, c, g, or t
  misc_feature (802)..(802): n is a, c, g, or t
  misc_feature (846)..(846): n is a, c, g, or t
  misc_feature (864)..(864): n is a, c, g, or t
  misc_feature (873)..(873): n is a, c, g, or t
  misc_feature (890)..(890): n is a, c, g, or t
  misc_feature (908)..(908): n is a, c, g, or t
  misc_feature (957)..(957): n is a, c, g, or t
  misc_feature (968)..(968): n is a, c, g, or t
  misc_feature (975)..(975): n is a, c, g, or t
  misc_feature (985)..(985): n is a, c, g, or t
  misc_feature (1001)..(1001): n is a, c, g, or t
  misc_feature (1018)..(1018): n is a, c, g, or t
  misc_feature (1020)..(1020): n is a, c, g, or t
  misc_feature (1027)..(1027): n is a, c, g, or t
  misc_feature (1031)..(1031): n is a, c, g, or t
  misc_feature (1033)..(1033): n is a, c, g, or t
  misc_feature (1036)..(1036): n is a, c, g, or t
  misc_feature (1050)..(1050): n is a, c, g, or t
  misc_feature (1054)..(1054): n is a, c, g, or t
  misc_feature (1059)..(1059): n is a, c, g, or t
  misc_feature (1066)..(1066): n is a, c, g, or t
  misc_feature (1068)..(1068): n is a, c, g, or t
  misc_feature (1076)..(1076): n is a, c, g, or t
  misc_feature (1080)..(1080): n is a, c, g, or t
  misc_feature (1090)..(1090): n is a, c, g, or t
  misc_feature (1093)..(1093): n is a, c, g, or t
  misc_feature (1097)..(1097): n is a, c, g, or t
  misc_feature (1114)..(1115): n is a, c, g, or t
  misc_feature (1118)..(1118): n is a, c, g, or t
  misc_feature (1124)..(1124): n is a, c, g, or t
  misc_feature (1130)..(1130): n is a, c, g, or t
  misc_feature (1132)..(1132): n is a, c, g, or t
  misc_feature (1136)..(1137): n is a, c, g, or t
  misc_feature (1140)..(1140): n is a, c, g, or t
gtgcttggaaagatggcgtcccgcaaggaaggtaccggctctactgccacctcttccagctccaccgccggcgcagcagggaaaggcaaaggcaaaggcggctcgggagattcagccgtgaagcaagtgcagatagatggccttgtggtattaaagataatcaaacattatcaagaagaaggacaaggaactgaagttgttcaaggagtgcttttgggtctggttgtagaagatcggcttgaaattaccaactgctttcctttccctcagcacacagaggatgatgctgactttgatgaagtccaatatcagatggaaatgatgcggagccttcgccatgtaaacattgatcatcttcacgtgggctggtatcagtccacatactatggctcattcgttacccgggcactcctggactctcagtttagttaccagcatgccattgaagaatctgtcgttctcatttatgatcccataaaaactgcccaaggatctctctcactaaaggcatacagactgactcctaaactgatggaagtttgtaaagaaaaggatttttcccctgaagcattgaaaaaagcaaatatcacctttgagtacatgtttgaagaagtgccgattgtaattaaaaattcacatctgatcaatgtcctaatgtgggaacttgaaaagaagtcagctgttgcagataaacatgaattgctcagccttgccagcagcaatcatttggggaagaatctacagttgctgatggacagagtggatgaaatgagccaagatatagttaaatacancacatacntgaggaatactagtaaacaacagcagcagaaacatcagtatcancagcgtccccagcagganaatatgcancgccaaaccgaagaaanccccgctccctgaggagnactgtccaactcttcaaacacaaaccgcctgcagatgactccctgctcntgcaggcaaanaaacctnactgccaaanatcaggattcctgccnaaacttaggaagctttntnggccagntctncnaanacccactaaaaaangaanttccnaaaaaantnaaatgaancttngagtcccccnggnaccnttggaaaaaaatttttnnttnaaaacnaaagantntttnnggnt

SEQ ID NO: 341 - DNA, 870 bp, Homo sapiens
  misc_feature (822)..(845): n is a, c, g, or t
  misc_feature (848)..(848): n is a, c, g, or t
gggatgcgagaggcagtccaggaaatgaaggaccatatggtcagcccaacagccgtagcatttttggagaggaataacagagagatactcgcaggcaagccagctgcccagaagtcacccagcgacctgctggatgccagcgcagtctcggccacatctcgctacatcgaggagcagcaggccacacagcagctgatcatggatgaacaggatcaacagctggagatggtgtctgggagcatccaggttctgaagcacatgtccggccgcgttggagaagagctggacgagcagggcatcatgctggatgccttcgcccaagagatggaccacacccagtcccgcatggacggggtcctcaggaagttggccaaagtatcccacatgacgagtgaccgccgacagtggtgtgccatcgccgtgctagtgggggtgcttctcctcgttctcatcttactattctctctctgaccccagccctccctggcaggctggtcccttaagcctggggagccaccaagcactttggagctggcctcgccccctaggaggagagggtccctcctgggtagctggagagtagagggtcccgcctggggagctgtccccatggctctcccctagagccagtgggacccttcaggaccctgggctggaaccaccaccactggtcctgtctcaagtgcacttagggggtggtggaggcagggacacctgagacacacctgtctccatttccagttccaggaccccaaagccatttgcccctgtgccttatacacgtgccaacctggaaaataaaatgtcagccttttttataannnnnnnnnnnnnnnnnnnnnnnnaanggcggccgctccctatagtgag

SEQ ID NO: 342 - DNA, 1027 bp, Homo sapiens
  misc_feature (785)..(785): n is a, c, g, or t
  misc_feature (840)..(840): n is a, c, g, or t
  misc_feature (846)..(846): n is a, c, g, or t
  misc_feature (862)..(862): n is a, c, g, or t
  misc_feature (893)..(893): n is a, c, g, or t
  misc_feature (911)..(911): n is a, c, g, or t
  misc_feature (917)..(917): n is a, c, g, or t
  misc_feature (935)..(935): n is a, c, g, or t
  misc_feature (944)..(944): n is a, c, g, or t
  misc_feature (947)..(947): n is a, c, g, or t
  misc_feature (949)..(949): n is a, c, g, or t
  misc_feature (953)..(953): n is a, c, g, or t
  misc_feature (955)..(955): n is a, c, g, or t
  misc_feature (958)..(958): n is a, c, g, or t
  misc_feature (986)..(986): n is a, c, g, or t
  misc_feature (993)..(994): n is a, c, g, or t
  misc_feature (997)..(997): n is a, c, g, or t
  misc_feature (999)..(999): n is a, c, g, or t
  misc_feature (1003)..(1003): n is a, c, g, or t
  misc_feature (1027)..(1027): n is a, c, g, or t
gggaccctcctgcaagacctgaccaacaacatcacccttgaagatctagaacagctcaagtcggcctgcaaggaagacatccccagcgaaaagagtgaggagatcactactggcagtgcctggtttagcttcctggagagccacaacaagctggacaaagacaacctctcctacattgagcacatctttgagatctcccgccgtcctgacctactcactatggtggttgactacagaacccgtgtgctgaagatctctgaggaggatgagctggacaccaagctaacccgtatccccagtgccaagaagtacaaagacattatccggcagccctctgaggaagagatcatcaaattggctcccccaccgaagaaggcctgagcaagggggaggaagaggaggaaggttggaccttcatcagaccactcccttcccccatcctccaggagagggggcaagggcaacccaccatctacccacttactaacctggtcctaacccccttactgtgcgcgtgtgtgtgcgtgtgcgcacgctctggctgtttgtctatatgtctagctcatctagttcctcttcttaaggggatgggggtcaggggctaggggagggggctgagtttccccactttaggaggaggtgggggctatttctatgcaaatagaaatcagcacattcctcctacttccctttcctccactccccccatatctttaaagtgtggaagcagaaaggacctgcattttcctacattgaggagctgacataggggtaaggtatggganaggtaggtggatccagggaaaagcagtggggacggaaggcaaagagaccactcancccccncctggaaggggcaaanaaaagccagagttccatgtttgtactcctgngctggactgtttcctgantaccancaggtccttttttgtctntcatgggcntancntagntnganccagggatcctttctggtccctaaaatnaaccccnngancncccncgttaaatgccccccccccctgtn

SEQ ID NO: 343 - DNA, 895 bp, Homo sapiens
  misc_feature (520)..(520): n is a, c, g, or t
  misc_feature (523)..(523): n is a, c, g, or t
  misc_feature (605)..(605): n is a, c, g, or t
  misc_feature (647)..(647): n is a, c, g, or t
  misc_feature (675)..(675): n is a, c, g, or t
  misc_feature (686)..(686): n is a, c, g, or t
  misc_feature (700)..(700): n is a, c, g, or t
  misc_feature (706)..(706): n is a, c, g, or t
  misc_feature (763)..(763): n is a, c, g, or t
  misc_feature (792)..(792): n is a, c, g, or t
  misc_feature (813)..(813): n is a, c, g, or t
  misc_feature (819)..(819): n is a, c, g, or t
  misc_feature (826)..(826): n is a, c, g, or t
  misc_feature (828)..(828): n is a, c, g, or t
  misc_feature (836)..(836): n is a, c, g, or t
  misc_feature (843)..(843): n is a, c, g, or t
  misc_feature (854)..(854): n is a, c, g, or t
  misc_feature (857)..(857): n is a, c, g, or t
  misc_feature (861)..(862): n is a, c, g, or t
  misc_feature (864)..(864): n is a, c, g, or t
  misc_feature (895)..(895): n is a, c, g, or t
gggggacgctgcggggggacccgtgctgaggcggcggcggcgacgtgggctgcggcgggcccgcggcgtcgggcggtgcggatgtcgggctgggcggacgagcgcggcggcgagggcgacgggcgcatctacgtggggaaccttccgaccgacgtgcgcgagaaggacttggaggacctgttctacaagtacggccgcatccgcgagatcgagctcaagaaccggcacggcctcgtgcccttcgccttcgtgcgcttcgaggacccccgagatgcagaggatgctatttatggaagaaatggttatgattatggccagtgtcggcttcgtgtggagttccccaggacttatggaggtcggggtgggtggccccgtggtgggaggaatgggcctcctacaagaagatctgatttccgagttcttgtttcaggacttcctccgtcaggcagctggcaggacctgaaggatcacatgcgagaagctggggatgtctgttatgctgatgtgcagaaggatggantgnggatggtcgagtatctcagaaaagaagacatggaatatgccctgcgtaaactggatgacaccaaattccgctctcatgaggntgaaacttcctacatccgagtttatcctgagagaagcaccanctatggctactcacggtctcggtctggntcaaggggccntgactctccatacnaaaacnaagggttcccccacacctacttctctccttttcaggcccctacttgaaacaggtgantgggaaatttttttcttttaatttattanggttaacctgaacttgctttngtgctncaaaaancnacattccnaaatttnaagaatttaantgntctnnangaaaattttttttaatttttttttttttttn

SEQ ID NO: 344 - DNA, 998 bp, Homo sapiens
  misc_feature (683)..(683): n is a, c, g, or t
  misc_feature (773)..(773): n is a, c, g, or t
  misc_feature (801)..(801): n is a, c, g, or t
  misc_feature (832)..(832): n is a, c, g, or t
  misc_feature (839)..(839): n is a, c, g, or t
  misc_feature (847)..(847): n is a, c, g, or t
  misc_feature (862)..(862): n is a, c, g, or t
  misc_feature (865)..(865): n is a, c, g, or t
  misc_feature (869)..(869): n is a, c, g, or t
  misc_feature (877)..(877): n is a, c, g, or t
  misc_feature (884)..(884): n is a, c, g, or t
  misc_feature (888)..(888): n is a, c, g, or t
  misc_feature (891)..(891): n is a, c, g, or t
  misc_feature (894)..(894): n is a, c, g, or t
  misc_feature (900)..(900): n is a, c, g, or t
  misc_feature (904)..(904): n is a, c, g, or t
  misc_feature (914)..(914): n is a, c, g, or t
  misc_feature (918)..(918): n is a, c, g, or t
  misc_feature (922)..(922): n is a, c, g, or t
  misc_feature (940)..(940): n is a, c, g, or t
  misc_feature (946)..(946): n is a, c, g, or t
  misc_feature (948)..(948): n is a, c, g, or t
  misc_feature (954)..(954): n is a, c, g, or t
  misc_feature (960)..(960): n is a, c, g, or t
  misc_feature (963)..(963): n is a, c, g, or t
  misc_feature (968)..(969): n is a, c, g, or t
  misc_feature (972)..(972): n is a, c, g, or t
  misc_feature (980)..(980): n is a, c, g, or t
  misc_feature (995)..(995): n is a, c, g, or t
gcgatgtggccgtggaggggcttaacgggcagctgcccaaccttgacctgctcaatctcttccagaccttctgccagaaagggggcctgttgtgcacgcttcagggcaagctgcagcccgaggactggacatcattggatggaccgctgcagggcctgcagacactgctgctcatggttctgcggcaggcctccggccgcccccacggctcccatggcctcttcctgcgctaccgtgtggaggccctaaccctgcgtggcatcaatagcttccgccagtacaagtatgacctggtggcagtgggcaaggctttggagggcatgttccgcaagctcaaccacctcctggagcgcctgcaccagtccttcttcctctacttgctccccggcctctcccgcttcgtctccatcggcctctacatgcccgctgtcggcttcttgctcctggtccttggtctcaaggctctggaactgtggatgcagctgcatgaggctggaatgggccttgaggagcccgggggtgcccctggccccagtgtaccccttcccccatcacagggtgtggggctggcctcgctcgtggcacctctgctgatctcacaggccatgggactggccctctatgtcctgccagtgctgggccaacacgttgccacccagcacttcccagtggcaaaagctgangctgtggtgctgacactgctggcgatttatgcagctggcctggccctgccccacaatacccaccgggtggtaagcacacaggcccaaaanaggggctggatggcactgaaactggtanccctgatctactaacactgcagctgggctgnatcgccntcaacaanttctcaatggcttcntgntggncaaccacnatggtgnccantgntgngcttgncaancctcatgggncccngaancctctatgctgccctggngggggntnaaaaancccggnaancaacnntcnttgggaancctgtttctgggggngga

SEQ ID NO: 345 - DNA, 1105 bp, Homo sapiens
  misc_feature (753)..(753): n is a, c, g, or t
  misc_feature (834)..(834): n is a, c, g, or t
  misc_feature (842)..(842): n is a, c, g, or t
  misc_feature (860)..(860): n is a, c, g, or t
  misc_feature (862)..(862): n is a, c, g, or t
  misc_feature (866)..(866): n is a, c, g, or t
  misc_feature (895)..(895): n is a, c, g, or t
  misc_feature (898)..(898): n is a, c, g, or t
  misc_feature (900)..(900): n is a, c, g, or t
  misc_feature (917)..(917): n is a, c, g, or t
  misc_feature (922)..(922): n is a, c, g, or t
  misc_feature (929)..(929): n is a, c, g, or t
  misc_feature (936)..(936): n is a, c, g, or t
  misc_feature (968)..(968): n is a, c, g, or t
  misc_feature (985)..(985): n is a, c, g, or t
  misc_feature (987)..(987): n is a, c, g, or t
  misc_feature (989)..(989): n is a, c, g, or t
  misc_feature (1000)..(1000): n is a, c, g, or t
  misc_feature (1007)..(1007): n is a, c, g, or t
  misc_feature (1012)..(1013): n is a, c, g, or t
  misc_feature (1016)..(1016): n is a, c, g, or t
  misc_feature (1031)..(1032): n is a, c, g, or t
  misc_feature (1047)..(1047): n is a, c, g, or t
  misc_feature (1053)..(1053): n is a, c, g, or t
  misc_feature (1061)..(1061): n is a, c, g, or t
  misc_feature (1063)..(1063): n is a, c, g, or t
  misc_feature (1073)..(1074): n is a, c, g, or t
  misc_feature (1087)..(1088): n is a, c, g, or t
  misc_feature (1090)..(1090): n is a, c, g, or t
  misc_feature (1093)..(1095): n is a, c, g, or t
  misc_feature (1097)..(1097): n is a, c, g, or t
  misc_feature (1103)..(1103): n is a, c, g, or t
  misc_feature (1105)..(1105): n is a, c, g, or t
ggtggcttcctggatgactgcgtcgatccctgctgtgattctttgacctgccagctgaggccaggtgcacagtgtgcatctgacggaccctgttgtcaaaattgccagctgcgcccgtctggctggcagtgtcgtcctaccagaggggattgtgacttgcctgaattctgcccaggagacagctcccagtgtccccctgatgtcagcctaggggatggcgagccctgcgctggcgggcaagctgtgtgcatgcacgggcgttgtgcctcctatgcccagcagtgccagtcactttggggacctggagcccagcccgctgcgccactttgcctccagacagctaatactcggggaaatgcttttgggagctgtgggcgcaaccccagtggcagttatgtgtcctgcacccctagagatgccatttgtgggcagctccagtgccagacaggtaggacccagcctctgctgggctccatccgggatctactctgggagacaatagatgtgaatgggactgagctgaactgcagctgggtgcacctggacctgggcagtgatgtggcccagcccctcctgactctgcctggcacagcctgtggccctggcctggtgtgtatagaccatcgatgccagcgtgtggatctcctgggggcacaggaatgtcgaagcaaatgccatggacatggggtctgtgacagcaacaggcactgctactgtgaggagggctgggcaccccctgactgcaccactcanctcaaagcaaccagctccctgaaccacagggctgctcctcagcctcctggtcttattggtcctggtgatgcttggtgccanctactggnaccgtgcccgcctgcacnancgantctgccaactcaagggacccacctgccantananggcaaccccaatctggntcccnctgaaanggccaanaacctccccaaaaggcccctgctggcacaagnactaaacaaggtaatgntntnaacttcccggnccccccnttcannccnttgcccctgaacctnntttcaaaaaaaatcnaatttnaaggggcnancaaacccccnnccccaaaaaaacnntnccnnncnaacccnan

SEQ ID NO: 346 - DNA, 1090 bp, Homo sapiens
  misc_feature (764)..(764): n is a, c, g, or t
  misc_feature (785)..(785): n is a, c, g, or t
  misc_feature (802)..(802): n is a, c, g, or t
  misc_feature (806)..(806): n is a, c, g, or t
  misc_feature (815)..(815): n is a, c, g, or t
  misc_feature (847)..(847): n is a, c, g, or t
  misc_feature (853)..(853): n is a, c, g, or t
  misc_feature (859)..(860): n is a, c, g, or t
  misc_feature (864)..(864): n is a, c, g, or t
  misc_feature (878)..(878): n is a, c, g, or t
  misc_feature (886)..(886): n is a, c, g, or t
  misc_feature (888)..(888): n is a, c, g, or t
  misc_feature (908)..(908): n is a, c, g, or t
  misc_feature (915)..(915): n is a, c, g, or t
  misc_feature (917)..(917): n is a, c, g, or t
  misc_feature (921)..(921): n is a, c, g, or t
  misc_feature (933)..(934): n is a, c, g, or t
  misc_feature (948)..(948): n is a, c, g, or t
  misc_feature (956)..(956): n is a, c, g, or t
  misc_feature (961)..(961): n is a, c, g, or t
  misc_feature (965)..(965): n is a, c, g, or t
  misc_feature (982)..(983): n is a, c, g, or t
  misc_feature (987)..(987): n is a, c, g, or t
  misc_feature (1009)..(1009): n is a, c, g, or t
  misc_feature (1029)..(1029): n is a, c, g, or t
  misc_feature (1031)..(1031): n is a, c, g, or t
  misc_feature (1033)..(1034): n is a, c, g, or t
  misc_feature (1047)..(1047): n is a, c, g, or t
  misc_feature (1050)..(1051): n is a, c, g, or t
  misc_feature (1057)..(1058): n is a, c, g, or t
  misc_feature (1060)..(1062): n is a, c, g, or t
  misc_feature (1073)..(1073): n is a, c, g, or t
  misc_feature (1077)..(1077): n is a, c, g, or t
  misc_feature (1081)..(1081): n is a, c, g, or t
gatccttgggccgctgggcaagcggcgagacctggccagggccagcgagccgaggacagagggcgcacggagggccgggccgcagccccggccgcttgcagaccccgccatggacccgttcctggtgctgctgcactcggtgtcgtccagcctgtcgagcagcgagctgaccgagctcaagttcctatgcctcgggcgcgtgggcaagcgcaagctggagcgcgtgcagagcggcctagacctcttctccatgctgctggagcagaacgacctggagcccgggcacaccgagctcctgcgcgagctgctcgcctccctgcggcgccacgacctgctgcggcgcgtcgacgacttcgaggcgggggcggcggccggggccgcgcctggggaagaagacctgtgtgcagcatttaacgtcatatgtgataatgtggggaaagattggagaaggctggctcgtcagctcaaagtctcagacaccaagatcgacagcatcgaggacagatacccccgcaacctgacagagcgtgtgcgggagtcactgagaatctggaagaacacagagaaggagaacgcaacagtggcccacctggtgggggctctcaggtcctgccagatgaacctggtggctgacctggtacaagaggttcagcaggcccgtgacctccagaacaggagtggggccatgtccccgatgtcatggaactcagacgcatctacctccgaagcgtcctgatgggccgctgctttgcgctggtggaacnacaggcatctacacagcctgnactttggttctctccangaangtaccccancactgtgaaaacccaccaagaaacccaggctnattgancccacnnaacnacctgcttttgaantcaagctncnttttattaatgcctctcccncaccagncngggnttgggccctgcnnaaaatttccatttntttcctcnttatnaaantgaacaaaatctttttnnccantaaataaactcctgccggaaanatttgaaaatttgaaacctntncnnacaaaaaagaatnttnncaaaannannnttccctttttncccncacnggaagaaaa

SEQ ID NO: 347 - DNA, 1147 bp, Homo sapiens
  misc_feature (863)..(863): n is a, c, g, or t
  misc_feature (870)..(870): n is a, c, g, or t
  misc_feature (885)..(885): n is a, c, g, or t
  misc_feature (890)..(890): n is a, c, g, or t
  misc_feature (901)..(901): n is a, c, g, or t
  misc_feature (906)..(906): n is a, c, g, or t
  misc_feature (934)..(934): n is a, c, g, or t
  misc_feature (947)..(947): n is a, c, g, or t
  misc_feature (962)..(962): n is a, c, g, or t
  misc_feature (978)..(978): n is a, c, g, or t
  misc_feature (1013)..(1014): n is a, c, g, or t
  misc_feature (1017)..(1017): n is a, c, g, or t
  misc_feature (1021)..(1021): n is a, c, g, or t
  misc_feature (1025)..(1025): n is a, c, g, or t
  misc_feature (1027)..(1027): n is a, c, g, or t
  misc_feature (1034)..(1034): n is a, c, g, or t
  misc_feature (1049)..(1050): n is a, c, g, or t
  misc_feature (1055)..(1055): n is a, c, g, or t
  misc_feature (1059)..(1059): n is a, c, g, or t
  misc_feature (1061)..(1061): n is a, c, g, or t
  misc_feature (1069)..(1069): n is a, c, g, or t
  misc_feature (1074)..(1075): n is a, c, g, or t
  misc_feature (1081)..(1081): n is a, c, g, or t
  misc_feature (1086)..(1086): n is a, c, g, or t
  misc_feature (1097)..(1099): n is a, c, g, or t
  misc_feature (1106)..(1106): n is a, c, g, or t
  misc_feature (1113)..(1113): n is a, c, g, or t
  misc_feature (1125)..(1125): n is a, c, g, or t
  misc_feature (1128)..(1128): n is a, c, g, or t
  misc_feature (1130)..(1131): n is a, c, g, or t
ggtccctttgtggccgccatggacaattccgggaaggaagcggaggcgatggcgctgttggccgaggcggagcgcaaagtgaagaactcgcagtccttcttctctggcctctttggaggctcatccaaaatagaggaagcatgcgaaatctacgccagagcagcaaacatgttcaaaatggccaaaaactggagtgctgctggaaacgcgttctgccaggctgcacagctgcacctgcagctccagagcaagcacgacgcagccacctgctttgtggacgctggcaacgcattcaagaaagccgacccccaagaggccattaactgtttgatgcgagcaatcgagatctacacagacatgggccgattcacgattgcggccaagcaccacatctccattgctgagatctatgagacagagttggtggacatcgagaaggccattgcccactacgagcagtctgcagactactacaaaggcgaggagtccaacagctcagccaacaagtgtctgctgaaggtggctggttacgctgcgctgctggagcagtatcagaaggccattgacatctacgaacaggtggggaccaatgccatggacagccccctcctcaagtacagcgccaaagactacttcttcaaggcggccctctgccacttctgcatcgacatgctcaacgccaagctggctgtccaaaagtatgaggagctgttcccagctttctctgattcccgggaatgcaagttgatgaaaaaattgctagaggcccacgaggagcaaaatgtggacagctacaccgagtcggtgaaggaatacgactccatctcccggctggaccagtggctcaccaccatgctgctgcncatcaanaaaacatccagggcnatgangaagacctgcnctaanccccacccagcccccagtgccgttttcntgtccatctgctnaaaaaaggggggccnaaacttgctggaaacntccctcctttccctctgggaatgccccggcccaannggncagnggcncngggttanctgcaggggcccaannccagntgtngncggaaaanccccnngtttcncaaancctgccccggnnnttttaanccccaanggccttcccccnaancnntttaaaaattttaaaa

SEQ ID NO: 348 - DNA, 1104 bp, Homo sapiens
  misc_feature (749)..(749): n is a, c, g, or t
  misc_feature (812)..(812): n is a, c, g, or t
  misc_feature (837)..(837): n is a, c, g, or t
  misc_feature (843)..(843): n is a, c, g, or t
  misc_feature (846)..(846): n is a, c, g, or t
  misc_feature (859)..(859): n is a, c, g, or t
  misc_feature (918)..(918): n is a, c, g, or t
  misc_feature (952)..(952): n is a, c, g, or t
  misc_feature (958)..(958): n is a, c, g, or t
  misc_feature (968)..(968): n is a, c, g, or t
  misc_feature (974)..(974): n is a, c, g, or t
  misc_feature (981)..(981): n is a, c, g, or t
  misc_feature (989)..(989): n is a, c, g, or t
  misc_feature (1009)..(1009): n is a, c, g, or t
  misc_feature (1036)..(1036): n is a, c, g, or t
  misc_feature (1038)..(1038): n is a, c, g, or t
  misc_feature (1043)..(1043): n is a, c, g, or t
  misc_feature (1049)..(1049): n is a, c, g, or t
  misc_feature (1053)..(1053): n is a, c, g, or t
  misc_feature (1056)..(1056): n is a, c, g, or t
  misc_feature (1064)..(1064): n is a, c, g, or t
  misc_feature (1067)..(1067): n is a, c, g, or t
  misc_feature (1079)..(1079): n is a, c, g, or t
  misc_feature (1081)..(1081): n is a, c, g, or t
  misc_feature (1086)..(1086): n is a, c, g, or t
  misc_feature (1091)..(1092): n is a, c, g, or t
  misc_feature (1098)..(1099): n is a, c, g, or t
  misc_feature (1101)..(1101): n is a, c, g, or t
  misc_feature (1103)..(1103): n is a, c, g, or t
gagctgagccagggcctggccgtggagctgatggaacgcgtgatgatggagtttgtgagggaaacctgctcccaggagttgaagaatgcagtagagacagaccagagggtccgtgtggcccgttgctgtgaggatgtctgtgcccacttagtggacttgtttctcgtggaggaaatcttccagactgcaaaggagaccctccaggagcttcagtgcttctgcaagtatctacagcggtggagggaagctgtcacagcccgcaagaaactgaggcgccaaatgcgggctttccctgctgcgccctgctgcgtggacgtgagcgaccggctgagggcgctggcgcccagcgcagagtgccccattgctgaagagaacctggccaggggcctcctggacctgggccatgcagggagattgggcatctcctgcaccaggttaaggcggctcagaaacaagacagctcaccagatgaaggttcagcacttctaccagcagctgctgagtgatgtggcatgggcgtctctggacctgccatccctcgtggctgagcacctccctgggaggcaggagcatgtgttttggaagctggtgctggtgttgccggatgtagaggagcagtccccagagagttgtggcagaattctagcaaattggttaaaagtcaagttcatgggagatgaaggctcagtggatgacacatccagcgatgctggtgggattcagacgctttcgcttttcaactcacttancagcaaaggggatcagatgatttctgttaacgtgtgtataaaggtggcccatggcgccctcantgatggtgccattgatgctgtgganacacanaangacctcctggganccagtgggctcatgctgctgcttccccccaaaatgaaaaatgaggacatggcaaaagangacgtgtactggctgtcggccttgctgcactcancactcntgcagctaanccttcnacctgcncttccttnggggttttgtgcctacccanaagggacccctttaaaagaataaaaangnttttnaagaantccnttntaaacacnttnttaaaaatgggngnagccngggtnnaaaagnncnana

SEQ ID NO: 349 - DNA, 1034 bp, Homo sapiens
  misc_feature (788)..(788): n is a, c, g, or t
  misc_feature (814)..(814): n is a, c, g, or t
  misc_feature (817)..(817): n is a, c, g, or t
  misc_feature (832)..(832): n is a, c, g, or t
  misc_feature (835)..(835): n is a, c, g, or t
  misc_feature (871)..(871): n is a, c, g, or t
  misc_feature (902)..(902): n is a, c, g, or t
  misc_feature (909)..(909): n is a, c, g, or t
  misc_feature (921)..(921): n is a, c, g, or t
  misc_feature (925)..(925): n is a, c, g, or t
  misc_feature (954)..(954): n is a, c, g, or t
  misc_feature (962)..(962): n is a, c, g, or t
  misc_feature (964)..(964): n is a, c, g, or t
  misc_feature (966)..(966): n is a, c, g, or t
  misc_feature (968)..(968): n is a, c, g, or t
  misc_feature (973)..(973): n is a, c, g, or t
  misc_feature (977)..(977): n is a, c, g, or t
  misc_feature (982)..(982): n is a, c, g, or t
  misc_feature (993)..(993): n is a, c, g, or t
  misc_feature (995)..(995): n is a, c, g, or t
  misc_feature (1019)..(1019): n is a, c, g, or t
  misc_feature (1025)..(1025): n is a, c, g, or t
  misc_feature (1027)..(1027): n is a, c, g, or t
  misc_feature (1031)..(1031): n is a, c, g, or t
  misc_feature (1033)..(1034): n is a, c, g, or t
gtcctctttgacaacacgggccgcagcaaaagcaaatccgtggagctggaggatgtgaagttccaccagtgtgtgcggctatcacgcttcgagaatgaccgcaccatctccttcatcccacccgacggcgagttcgagctcatgtcctaccgtctcaacacccacgtcaagcctttgatatggatcgagtcggtgatcgagaagcactcccacagccgcatcgagtacatgatcaaggccaaaagccagttcaagcggcggtcaacagccaacaacgtggagatccacattcccgtgcccaatgatgccgactcacccaagttcaagacgacggtggggagcgttaagtgggtccccgagaacagcgagattgtgtggtccatcaagtccttcccgggcggcaaggagtacctgatgcgggcccacttcggcctgcctagtgtggaggccgaagacaaggagggcaagcccccgatcagtgtcaagttcgagatcccttacttcactacctccggcatccaggtgcgctacctgaagatcattgagaagagtgggtaccaggccctgccctgggtgcgttatatcacgcagaatggagattaccagctccggacccagtgaggggctgtcgcagccaacaccccggcctcggggctcctggtggcagcaccaggggacacacctgccaaacccaccagatggaggggcccctccctggtctctggccaccctcccagcctctgcccagggacccctgccttccccaggccatctgctctgccgtcganactcgtctcaaaagcccctttcccanaanaagctggtcttcaanaantctcgtttctttgcccctgaagtcagtttcaggggnaaggaagtgaaatttttccggggtaaaggtnaaagccnttttatggctgntganctcccaaggtaccaaaaagcttggccaangcttgccnancnanccagntggnagggnggaatctgccnanaaaggaaacccccaccctccccangccaanangggngnn

SEQ ID NO: 350 - DNA, 902 bp, Homo sapiens
  misc_feature (658)..(658): n is a, c, g, or t
  misc_feature (710)..(710): n is a, c, g, or t
  misc_feature (725)..(725): n is a, c, g, or t
  misc_feature (744)..(744): n is a, c, g, or t
  misc_feature (750)..(750): n is a, c, g, or t
  misc_feature (756)..(756): n is a, c, g, or t
  misc_feature (759)..(759): n is a, c, g, or t
  misc_feature (775)..(775): n is a, c, g, or t
  misc_feature (784)..(784): n is a, c, g, or t
  misc_feature (807)..(807): n is a, c, g, or t
  misc_feature (827)..(827): n is a, c, g, or t
  misc_feature (830)..(830): n is a, c, g, or t
  misc_feature (832)..(833): n is a, c, g, or t
  misc_feature (835)..(835): n is a, c, g, or t
  misc_feature (837)..(837): n is a, c, g, or t
  misc_feature (846)..(846): n is a, c, g, or t
  misc_feature (856)..(856): n is a, c, g, or t
  misc_feature (860)..(860): n is a, c, g, or t
  misc_feature (865)..(865): n is a, c, g, or t
  misc_feature (867)..(868): n is a, c, g, or t
  misc_feature (870)..(870): n is a, c, g, or t
  misc_feature (891)..(891): n is a, c, g, or t
  misc_feature (900)..(902): n is a, c, g, or t
gcttcctcattaagagcttcaatgacttcaactcctccccctccagtacctcccccacctccacctccagccactgctttgcaagctccagcagtaccaccacctccagctcctcttcagattgcccctggagttcttcacccagctcctcctccaattgcacctcctctagtacagccctctccaccagtagctagagctgccccagtatgtgagactgtaccagttcatccactcccacaaggtgaagttcaggggctgcctccacccccaccaccgcctcctctgcctccacctggcattcgaccatcatcacctgtcacagttacagctcttgctcatcctccctctgggctacatccaactccatctactgccccaggtccccatgttccattaatgcctccatctcctccatcacaagttatacctgcttctgagccaaagcgccatccatcaaccctacctgtaatcagtgatgccaggagtgtgctactggaagcaatacgaaaaggtattcagctacgcaaagtagaagagcagcgtgaacaggaagctaagcatgaacgcattgaaaacgatgttgccaccatcctgtctcgccgtattgctgttgaatatagtgattcggaagatgattcagaatttgatgaagtanattggttggagtaagaaaaaatgcattgataaatattacaaaactgaatgcnaatgtcctttgtggngcttgttccttgaaaatgnttgggncattcnagngttttgctttcttttnccttataanaaatgacccttttcctccataanttttgatttctaaggaaaanatnannananatttcaaantaaaggtttnaaanggggntnncnttttttttcccctgaaaagantaatttggnnn

SEQ ID NO: 351 - DNA, 1083 bp, Homo sapiens
  misc_feature (721)..(721): n is a, c, g, or t
  misc_feature (777)..(777): n is a, c, g, or t
  misc_feature (797)..(797): n is a, c, g, or t
  misc_feature (824)..(824): n is a, c, g, or t
  misc_feature (834)..(834): n is a, c, g, or t
  misc_feature (843)..(843): n is a, c, g, or t
  misc_feature (847)..(847): n is a, c, g, or t
  misc_feature (855)..(855): n is a, c, g, or t
  misc_feature (861)..(861): n is a, c, g, or t
  misc_feature (878)..(878): n is a, c, g, or t
  misc_feature (880)..(880): n is a, c, g, or t
  misc_feature (887)..(887): n is a, c, g, or t
  misc_feature (897)..(897): n is a, c, g, or t
  misc_feature (915)..(915): n is a, c, g, or t
  misc_feature (921)..(922): n is a, c, g, or t
  misc_feature (933)..(933): n is a, c, g, or t
  misc_feature (943)..(943): n is a, c, g, or t
  misc_feature (959)..(959): n is a, c, g, or t
  misc_feature (961)..(961): n is a, c, g, or t
  misc_feature (966)..(966): n is a, c, g, or t
  misc_feature (968)..(968): n is a, c, g, or t
  misc_feature (976)..(976): n is a, c, g, or t
  misc_feature (987)..(987): n is a, c, g, or t
  misc_feature (989)..(989): n is a, c, g, or t
  misc_feature (1001)..(1001): n is a, c, g, or t
  misc_feature (1004)..(1004): n is a, c, g, or t
  misc_feature (1014)..(1014): n is a, c, g, or t
  misc_feature (1018)..(1018): n is a, c, g, or t
  misc_feature (1034)..(1034): n is a, c, g, or t
  misc_feature (1036)..(1038): n is a, c, g, or t
  misc_feature (1048)..(1048): n is a, c, g, or t
  misc_feature (1055)..(1055): n is a, c, g, or t
  misc_feature (1060)..(1060): n is a, c, g, or t
  misc_feature (1067)..(1067): n is a, c, g, or t
  misc_feature (1069)..(1069): n is a, c, g, or t
  misc_feature (1074)..(1074): n is a, c, g, or t
  misc_feature (1083)..(1083): n is a, c, g, or t
ggcggggcccgggctctggagctcatggggcagctgcaggaccagcaggctctgcggcacatgcaggccagcctggtgcggacacccctgcagggcatccttcagctgggccaggaactgaaacccaagagcctagatgtgcggcaggaggagctgggggccgtggtcgacaaggagatggcggccacatccgcagccattgaagatgctgtgcggaggattgaggacatgatgaaccaggcacgccacgccagctcgggggtgaagctggaggtgaacgagaggatcctcaactcctgcacagacctgatgaaggtgaggggctgtgacccgggggggtctgcacctggagggccaccagtcattgctgtcttggtctcggcaggctatccggctcctggtgacgacatccactagcctgcagaaggagatcgtggagagcggcaggggggcagccacgcagcaggaattttacgccaagaactcgcgctggaccgaaggcctcatctcggcctccaaggctgtgggctggggagccacacagctggtggaggcagctgacaaggtggtgcttcacacgggcaagtatgaggagctcatcgtctgctcccacgagatcgcagccagcacggcccagctggtggcggcctccaaggtgaaggccaacaagcacagcccccacctgagccgcctgcaggaatgttctcgcacagtcaatganagggctgccaatgtggtggcctccaccaagtcaggccaggagcaaattgaggacanaaacaccatggatttctccngcctgtcccctcatcaagctgaaaaancaggaaatgnaaacccagntgcntgtcctgnaactgnaaaaaaccttgaagctnanccatgcngctggggganttgcgaaacaaaactacntgctgnntggggcatcangcacccttgnaaagaagtggcattcngnccaanantgcccccnaaatttaaccncnaaaaaccccccntgnccaaaaaccnacgnggccccaaaaagaccncnnnttgaaaaaanaagcatnacccnttcaatncngaatntagcccccn

SEQ ID NO: 352 - DNA, 754 bp, Homo sapiens
  misc_feature (727)..(729): n is a, c, g, or t
  misc_feature (734)..(739): n is a, c, g, or t
  misc_feature (742)..(744): n is a, c, g, or t
  misc_feature (746)..(754): n is a, c, g, or t
gctgccaacatggtgttcaggcgcttcgtggaggttggccgggtggcctatgtctcctttggacctcatgccggaaaattggtcgcgattgtagatgttattgatcagaacagggctttggtcgatggaccttgcactcaagtgaggagacaggccatgcctttcaagtgcatgcagctcactgatttcatcctcaagtttccgcacagtgcccaccagaagtatgtccgacaagcctggcagaaggcagacatcaatacaaaatgggcagccacacgatgggccaagaagattgaagccagagaaaggaaagccaagatgacagattttgatcgttttaaagttatgaaggcaaagaaaatgaggaacagaataatcaagaatgaagttaagaagcttcaaaaggcagctctcctgaaagcttctcccaaaaaagcacctggtactaagggtactgctgctgctgctgctgctgctgctgctgctgctgctgctgctgctgctaaagttccagcaaaaaaagatcaccgccgcgagtaaaaaggctccagcccagaaggttcctgcccagaaagccacaggccagaaagcagcgcctgctccaaaagctcagaagggtcaaaaagctccagcccagaaagcacctgctccaaaggcatctggcaagaaagcataagtggcaatcataaaaagtaataaaggttctttttgacctgttgaaaaaaannnaaaannnnnnaannnannnnnnnnn

SEQ ID NO: 353 - DNA, 944 bp, Homo sapiens
  misc_feature (270)..(270): n is a, c, g, or t
  misc_feature (309)..(309): n is a, c, g, or t
  misc_feature (667)..(667): n is a, c, g, or t
  misc_feature (775)..(775): n is a, c, g, or t
  misc_feature (790)..(790): n is a, c, g, or t
  misc_feature (816)..(816): n is a, c, g, or t
  misc_feature (823)..(823): n is a, c, g, or t
  misc_feature (829)..(829): n is a, c, g, or t
  misc_feature (836)..(836): n is a, c, g, or t
  misc_feature (840)..(840): n is a, c, g, or t
  misc_feature (848)..(848): n is a, c, g, or t
  misc_feature (855)..(855): n is a, c, g, or t
  misc_feature (857)..(857): n is a, c, g, or t
  misc_feature (864)..(864): n is a, c, g, or t
  misc_feature (869)..(869): n is a, c, g, or t
  misc_feature (876)..(876): n is a, c, g, or t
  misc_feature (880)..(881): n is a, c, g, or t
  misc_feature (888)..(888): n is a, c, g, or t
  misc_feature (898)..(898): n is a, c, g, or t
  misc_feature (903)..(903): n is a, c, g, or t
  misc_feature (917)..(917): n is a, c, g, or t
  misc_feature (921)..(921): n is a, c, g, or t
  misc_feature (923)..(923): n is a, c, g, or t
  misc_feature (925)..(925): n is a, c, g, or t
  misc_feature (929)..(929): n is a, c, g, or t
  misc_feature (934)..(934): n is a, c, g, or t
  misc_feature (939)..(939): n is a, c, g, or t
  misc_feature (942)..(942): n is a, c, g, or t
ggacagacccgcggggcaaacggactggggccaagagccgggagcgcgggcgcaaaggcaccagggcccgcccagggcgccgcgcagcacggccttgggggttctgcgggccttcgggtgcgcgtctcgcctctagccatggggtccgcagcgttggagatcctgggcctggtgctgtgcctggtgggctgggggggtctgatcctggcgtgcgggctgcccatgtggcaggtgaccgccttcctggaccacaacatcgtgacggcgcanaccacctggaaggggctgtggatgtcgtgcgtggtgcanagcaccgggcacatgcagtgcaaagtgtacgactcggtgctggctctgagcaccgaggtgcaggcggcgcgggcgctcaccgtgagcgccgtgctgctggcgttcgttgcgctcttcgtgaccctggcgggcgcgcagtgcaccacctgcgtggccccgggcccggccaaggcgcgtgtggccctcacgggaggcgtgctctacctgttttgcgggctgctggcgctcgtgccactctgctggttcgccaacattgtcgtccgcgagttttacgacccgtctgtgcccgtgtcgcaaaagtacgagctgggcgcagcgctgtacatcggctgggcggccaccgcgctgctcatggtangcggctgcctcttgtgctgcggcgcctgggtctgcaccggccgtcccgacctcagcttccccgtgaagtactcagcgccgcggcggcccacggccaccggcgactacnacaaaaaaaactacntctgaaggcgctgggcacggccgggncccctcntgccanccacgcntgcnaagcgttngaataancntgggganccccncatgganccgnngcttccnccgggtaacncggcncgcaagctcttcgnaaantncnggtnttgcnccccnaancg

SEQ ID NO: 354 - DNA, 1075 bp, Homo sapiens
  misc_feature (785)..(785): n is a, c, g, or t
  misc_feature (810)..(810): n is a, c, g, or t
  misc_feature (813)..(813): n is a, c, g, or t
  misc_feature (819)..(819): n is a, c, g, or t
  misc_feature (840)..(840): n is a, c, g, or t
  misc_feature (875)..(875): n is a, c, g, or t
  misc_feature (891)..(891): n is a, c, g, or t
  misc_feature (899)..(899): n is a, c, g, or t
  misc_feature (908)..(908): n is a, c, g, or t
  misc_feature (915)..(915): n is a, c, g, or t
  misc_feature (925)..(926): n is a, c, g, or t
  misc_feature (928)..(928): n is a, c, g, or t
  misc_feature (935)..(935): n is a, c, g, or t
  misc_feature (938)..(938): n is a, c, g, or t
  misc_feature (942)..(942): n is a, c, g, or t
  misc_feature (952)..(952): n is a, c, g, or t
  misc_feature (957)..(957): n is a, c, g, or t
  misc_feature (963)..(963): n is a, c, g, or t
  misc_feature (980)..(980): n is a, c, g, or t
  misc_feature (986)..(986): n is a, c, g, or t
  misc_feature (995)..(995): n is a, c, g, or t
  misc_feature (997)..(997): n is a, c, g, or t
  misc_feature (1000)..(1000): n is a, c, g, or t
  misc_feature (1018)..(1019): n is a, c, g, or t
  misc_feature (1021)..(1021): n is a, c, g, or t
  misc_feature (1027)..(1027): n is a, c, g, or t
  misc_feature (1032)..(1032): n is a, c, g, or t
  misc_feature (1034)..(1034): n is a, c, g, or t
  misc_feature (1051)..(1051): n is a, c, g, or t
  misc_feature (1055)..(1055): n is a, c, g, or t
  misc_feature (1059)..(1059): n is a, c, g, or t
  misc_feature (1064)..(1064): n is a, c, g, or t
  misc_feature (1070)..(1071): n is a, c, g, or t
gcccacgcgtccgcgcacaacccactcacagacaagcagatcgaccagttcctggtggtggcccgctctgtgggcaccttcgcacgggccctggactgcagcagctccgtccgacagcccagcctgcacatgagcgccgcagctgcctcccgagacatcaccctgttccacgccatggatactctccacaagaacatctacgacatctccaaggccatctcggcgctggtgccgcagggcgggcccgtgctctgcagggacgagatggaggagtggtctgcatcagaggccaaccttttcgaggaagccctggaaaaatatgggaaggatttcacggacattcagcaagattttctcccgtggaagtcgctgaccagcatcattgagtactactacatgtggaagaccaccgacagatacgtgcagcagaaacgcttgaaagcagctgaagctgagagcaagttaaagcaagtttatattcccaactataacaagccaaatccgaaccaaatcagcgtcaacaacatcaaggccggtgtggtgaacggcacgggggcgccgggccagagccctggggctggccgggcctgcgagagctgttacaccacacagtcttaccagtggtattcttggggtccccctaacatgcagtgtcgtctctgcgcatcttgttggacatattggaagaaatatggtggcttgaaaatgccaacccggttagatggagagaggccaggaccaaaccgcagtaacatgagtccccacggcctcccagcccggagcancgggagccccaagtttgccatgaanacnaggcangctttctatctgcacacgacnaactgacgcggatcgcccggcgcctgtgccgtganatcctgcgcccgtggnacgctgcncggcacccntacctgnccatcaaaanngnggccatnaanggcnaatggacggngcggntgcccnaaacctccaaaacccgntggggntaaaaaggngntancaaaccccttggaaaccnngntttcgnttttnanacccccccccccccccnaacntaancccgnaaaaannggtc

SEQ ID NO: 355 - DNA, 1100 bp, Homo sapiens
  misc_feature (876)..(876): n is a, c, g, or t
  misc_feature (927)..(927): n is a, c, g, or t
  misc_feature (937)..(937): n is a, c, g, or t
  misc_feature (942)..(942): n is a, c, g, or t
  misc_feature (953)..(953): n is a, c, g, or t
  misc_feature (955)..(955): n is a, c, g, or t
  misc_feature (961)..(961): n is a, c, g, or t
  misc_feature (966)..(966): n is a, c, g, or t
  misc_feature (1016)..(1016): n is a, c, g, or t
  misc_feature (1026)..(1026): n is a, c, g, or t
  misc_feature (1029)..(1029): n is a, c, g, or t
  misc_feature (1032)..(1032): n is a, c, g, or t
  misc_feature (1035)..(1035): n is a, c, g, or t
  misc_feature (1039)..(1040): n is a, c, g, or t
  misc_feature (1047)..(1047): n is a, c, g, or t
  misc_feature (1052)..(1052): n is a, c, g, or t
  misc_feature (1055)..(1055): n is a, c, g, or t
  misc_feature (1059)..(1059): n is a, c, g, or t
  misc_feature (1067)..(1067): n is a, c, g, or t
  misc_feature (1076)..(1076): n is a, c, g, or t
  misc_feature (1088)..(1088): n is a, c, g, or t
  misc_feature (1100)..(1100): n is a, c, g, or t
gctgacattcgcgttttacgggggcaccagctctctatcacatgtttggtcgtcacccccgatgactcagccatcttctctgctgccaaagactgcagcatcattaagtggagcgtggagagtggacggaagctgcatgtgattcctcgagccaagaagggtgccgagggaaagccccctggccacagcagccacgtcctctgcatggccatctcctccgacggcaagtaccttgcctctggtgaccgcagcaagctcattctcatttgggaggcccagagctgccagcacttgtacaccttcacaggacaccgggatgcagtgtcgggtctggcattccgcagaggcacccaccagctctacagcacatcccacgatcgctccgtgaaggtgtggaatgtggcagagaactcctacgtggagacgctcttcggacaccaggacgctgtggctgcactggatgccttgagccgggagtgctgtgtgacggctgggggccgggatgggactgtacgtgtgtggaagatccccgaggagtcccagcttgtcttctatggccaccagggctccatcgactgcatccacctaatcaatgaggagcacatggtgtccggcgcggacgatggctctgtggccttgtggggtctctccaagaagcgaccacttgccctgcagcgtgaagctcacgggctgcggggagagccaggcctggagcagcccttctggatatcgtcggtggcagccctcctcaacacagaccttgtggccacaggctcccacagctcctgtgtgcggcttttggcagtgtggggaaggcttccggcagcttgaccttctctgtgacatccccctggggggttttatcaacagcctcangttctccagctctggggacttcctggtggctggggtagggcaggaacacanggcttggccnatggngaaaatcaaanangctcgnaattntgtctgcatcatcccactcgcagggtcctgtaccccagctgctggttccngaacccttanccnccntanttannccttccnggctntgncccnccctcttntaataaaancccccccttttnaaaaaaaaaaan

SEQ ID NO: 356 - DNA, 1113 bp, Homo sapiens
  misc_feature (788)..(788): n is a, c, g, or t
  misc_feature (808)..(808): n is a, c, g, or t
  misc_feature (831)..(831): n is a, c, g, or t
  misc_feature (877)..(877): n is a, c, g, or t
  misc_feature (880)..(880): n is a, c, g, or t
  misc_feature (923)..(923): n is a, c, g, or t
  misc_feature (946)..(946): n is a, c, g, or t
  misc_feature (950)..(950): n is a, c, g, or t
  misc_feature (966)..(966): n is a, c, g, or t
  misc_feature (971)..(971): n is a, c, g, or t
  misc_feature (975)..(976): n is a, c, g, or t
  misc_feature (986)..(987): n is a, c, g, or t
  misc_feature (992)..(992): n is a, c, g, or t
  misc_feature (996)..(996): n is a, c, g, or t
  misc_feature (998)..(998): n is a, c, g, or t
  misc_feature (1006)..(1006): n is a, c, g, or t
  misc_feature (1011)..(1011): n is a, c, g, or t
  misc_feature (1015)..(1015): n is a, c, g, or t
  misc_feature (1026)..(1026): n is a, c, g, or t
  misc_feature (1036)..(1036): n is a, c, g, or t
  misc_feature (1053)..(1053): n is a, c, g, or t
  misc_feature (1062)..(1062): n is a, c, g, or t
  misc_feature (1069)..(1069): n is a, c, g, or t
  misc_feature (1075)..(1075): n is a, c, g, or t
  misc_feature (1077)..(1077): n is a, c, g, or t
  misc_feature (1079)..(1079): n is a, c, g, or t
  misc_feature (1081)..(1081): n is a, c, g, or t
  misc_feature (1086)..(1086): n is a, c, g, or t
  misc_feature (1093)..(1093): n is a, c, g, or t
  misc_feature (1101)..(1101): n is a, c, g, or t
  misc_feature (1105)..(1105): n is a, c, g, or t
gccggctccgcccccgtcgggtgtttgtggtggggctgcggagtcgccgatcccgccggaagcgccaggacaatggggacccgggacgacgagtacgactacctattcaaagtggtgctcatcggggactcaggcgtgggcaagagcaacctgctgtcgcgcttcacccgcaacgagttcaacctggagagcaagagcaccatcggcgtggagttcgccacccgcagcatccaggtggacggcaagaccatcaaggcgcagatctgggacaccgctggccaggagcgctaccgcgccatcacctccgcgtactaccgtggtgcagtgggcgccctgctggtgtacgacatcgccaagcacctgacctatgagaacgtggagcgctggctgaaggagctgcgggaccacgcagacagcaacatcgtcatcatgctggtgggcaacaagagtgacctgcgccacctgcgggctgtgcccactgacgaggcccgcgccttcgcagaaaagaacaacttgtccttcatcgagacctcagccttggattccactaacgtagaggaagcattcaagaacatcctcacagagatctaccgcatcgtgtcacagaaacagatcgcagaccgcgctgcccacgacgagtccccggggaacaacgtggtggacatcagcgtgccgcccaccacggacggacagaagcccaacaagctgcagtgctgccagaacctgtgacccctgcgcctccacccagcgtgcgtgcacgtcctccgcccgcccccgccaaggtatcntctggcccctccctgctgtncctctgtggccggctcgttccancccctcccagtgaactttgcacggccgggccgggggcccagaaagnacnggaaccagtgctaccccgtcctgcccggggaaaaacctaaaancccccggtttgctgcacccaatnaaantcggggttccccacancgttntttnncggggtgggnnaaggncgcnanaatggaanggggntggncaaaaacaaanaaaaaagggngaaaagccccccctttntcccttttncttggcnaacttnangnanaaatngcctccncccttttnaacnggggggcc

SEQ ID NO: 357 - DNA, 1065 bp, Homo sapiens
  misc_feature (789)..(789): n is a, c, g, or t
  misc_feature (794)..(794): n is a, c, g, or t
  misc_feature (871)..(871): n is a, c, g, or t
  misc_feature (880)..(880): n is a, c, g, or t
  misc_feature (954)..(954): n is a, c, g, or t
  misc_feature (956)..(956): n is a, c, g, or t
  misc_feature (966)..(967): n is a, c, g, or t
  misc_feature (976)..(976): n is a, c, g, or t
  misc_feature (979)..(979): n is a, c, g, or t
  misc_feature (986)..(986): n is a, c, g, or t
  misc_feature (989)..(989): n is a, c, g, or t
  misc_feature (997)..(997): n is a, c, g, or t
  misc_feature (999)..(1000): n is a, c, g, or t
  misc_feature (1002)..(1002): n is a, c, g, or t
  misc_feature (1004)..(1004): n is a, c, g, or t
  misc_feature (1007)..(1007): n is a, c, g, or t
  misc_feature (1015)..(1015): n is a, c, g, or t
  misc_feature (1019)..(1019): n is a, c, g, or t
  misc_feature (1029)..(1029): n is a, c, g, or t
  misc_feature (1034)..(1034): n is a, c, g, or t
  misc_feature (1036)..(1036): n is a, c, g, or t
  misc_feature (1040)..(1040): n is a, c, g, or t
  misc_feature (1059)..(1059): n is a, c, g, or t
  misc_feature (1064)..(1064): n is a, c, g, or t
gggaagacacagatgctgttgggcctgagccactggttccttcaccacaacctgtacctgaggtgcccagcctggaccccaccgtgctgccactctactccctggggccctcagggcagttggcagagacgccggctgaggtgttccaggccctggagcagctggggcaccaagcctttcgccctgggcaggagcgtgcagtcatgcggatcctgtctggcatctccacgctgctggtgctgcctacaggtgccggcaagtccctgtgctaccagctcccagcgctgctctacagccggcgcagcccctgcctcacgttggtcgtctctcccctgctgtcactcatggatgaccaggtgtctggcctgccaccgtgtctcaaggcggcctgcatacactcgggcatgaccaggaagcaacgggaatctgtcctgcagaagattcgggcagcccaggtacacgtgctgatgctgacacctgaggcactggtgggggcgggaggcctccctccagccgcacagctgcctccagttgcttttgcctgcattgatgaggcccactgcctctcccagtggtcccacaacttccggccctgctacctgcgcgtctgcaaggtgcttcgggagcgcatgggcgtgcactgcttcctgggcctcacagccacagccacacgccgcactgccagtgacgtggcacagcacctggctgtggctgaagagcctgacctccacgggccagccccagttcccaccaacctgcacctttccgtgtccatggacagggacacanaccangcactgttgacgctgctgcaaggcaaacgttttcaaacctcgattccattatcatttactgcaaccggcgcgagganacaaaacgnatcgctgcgctcctccaaactgcctgcacgcaacctgggttccagggtctgaagtcgtgcccccaaaaccaaancnaagcctacanncggcatgtncanccggaanggnggcggtanannancnttntgcaggcnattncggggggggngccangnggcntttggaaggggttgaccgncaaant

SEQ ID NO: 358 - DNA, 1095 bp, Homo sapiens
  misc_feature (677)..(677): n is a, c, g, or t
  misc_feature (692)..(692): n is a, c, g, or t
  misc_feature (759)..(759): n is a, c, g, or t
  misc_feature (777)..(777): n is a, c, g, or t
  misc_feature (787)..(787): n is a, c, g, or t
  misc_feature (806)..(806): n is a, c, g, or t
  misc_feature (821)..(821): n is a, c, g, or t
  misc_feature (833)..(833): n is a, c, g, or t
  misc_feature (841)..(841): n is a, c, g, or t
  misc_feature (900)..(900): n is a, c, g, or t
  misc_feature (903)..(903): n is a, c, g, or t
  misc_feature (905)..(905): n is a, c, g, or t
  misc_feature (912)..(912): n is a, c, g, or t
  misc_feature (916)..(916): n is a, c, g, or t
  misc_feature (920)..(920): n is a, c, g, or t
  misc_feature (927)..(927): n is a, c, g, or t
  misc_feature (956)..(957): n is a, c, g, or t
  misc_feature (974)..(974): n is a, c, g, or t
  misc_feature (991)..(991): n is a, c, g, or t
  misc_feature (995)..(995): n is a, c, g, or t
  misc_feature (1000)..(1000): n is a, c, g, or t
  misc_feature (1003)..(1003): n is a, c, g, or t
  misc_feature (1005)..(1005): n is a, c, g, or t
  misc_feature (1007)..(1008): n is a, c, g, or t
  misc_feature (1019)..(1021): n is a, c, g, or t
  misc_feature (1023)..(1023): n is a, c, g, or t
  misc_feature (1036)..(1036): n is a, c, g, or t
  misc_feature (1050)..(1050): n is a, c, g, or t
  misc_feature (1052)..(1052): n is a, c, g, or t
  misc_feature (1056)..(1056): n is a, c, g, or t
  misc_feature (1066)..(1066): n is a, c, g, or t
  misc_feature (1069)..(1069): n is a, c, g, or t
  misc_feature (1073)..(1073): n is a, c, g, or t
  misc_feature (1076)..(1076): n is a, c, g, or t
  misc_feature (1083)..(1083): n is a, c, g, or t
  misc_feature (1094)..(1094): n is a, c, g, or t
gcccacgcgtccggcggccgcgtcgggaccggccgcgatgggaccggaggcggcgcgggcggcggcggcgcagacaaaggggccaaaccagtgctcctgccacctctctggctgccccctagagcctgcccatcccagcctgaccaatgtccacagccagggagcagccaatcttcagcacacgggcgcacgtgttccaaattgacccagccaccaagcgaaactggatcccagcgggcaagcacgcactcactgtctcctatttctacgatgccacccgcaatgtgtaccgcatcatcagcatcggaggcgccaaggccatcatcaacagcactgtcactcccaacatgaccttcaccaaaacttcccagaagttcgggcagtgggccgacagtcgcgccaacacagtctacggcctgggctttgcctctgaacagcatctgacacagtttgccgagaagttccaggaagtgaaggaagcagccaggctggccagggagaaatctcaggatggcggggagctcaccagtccagccctggggctcgcctcccaccaggtgcccccgagccctctcgtcagtgccaacggccccggcgaggaaaaactgttccgcagccagagcgctgatgcccccggccccacagagcgcgagcggctaaagaagatgttgtctganggctccgtgggcgangtacagtgggaggccgagtttttcgcactgcaggacagcaacaacaagctggcaggcgccctgcganaggccaacgccgccgcancccagtggangcagcagctggaggctcancgtgcaaaggccgancggctgcggcancgggtggntgaactggaggctcaggcaacttcaaagtgaccccccccggtgaaaaggagggctgggncangncaattcnctgnaaanctggaanctttggtgcaaaccaaggaccagaaattnnaaacctgaaaattcaantggggggcccccgaagncctngaagntgncnanngtgaagaaatnnncnaaaggggcagacntggaaccccaaagngnaatngaaaaccacnttngggnaangaaccanctgaaaaaacnc

SEQ ID NO: 359 - DNA, 1057 bp, Homo sapiens
  misc_feature (778)..(778): n is a, c, g, or t
  misc_feature (782)..(782): n is a, c, g, or t
  misc_feature (801)..(801): n is a, c, g, or t
  misc_feature (809)..(809): n is a, c, g, or t
  misc_feature (834)..(834): n is a, c, g, or t
  misc_feature (840)..(840): n is a, c, g, or t
  misc_feature (846)..(846): n is a, c, g, or t
  misc_feature (884)..(885): n is a, c, g, or t
  misc_feature (913)..(913): n is a, c, g, or t
  misc_feature (925)..(925): n is a, c, g, or t
  misc_feature (931)..(931): n is a, c, g, or t
  misc_feature (941)..(941): n is a, c, g, or t
  misc_feature (946)..(946): n is a, c, g, or t
  misc_feature (950)..(950): n is a, c, g, or t
  misc_feature (955)..(955): n is a, c, g, or t
  misc_feature (960)..(960): n is a, c, g, or t
  misc_feature (971)..(971): n is a, c, g, or t
  misc_feature (975)..(975): n is a, c, g, or t
  misc_feature (982)..(982): n is a, c, g, or t
  misc_feature (989)..(989): n is a, c, g, or t
  misc_feature (992)..(992): n is a, c, g, or t
  misc_feature (1018)..(1018): n is a, c, g, or t
  misc_feature (1021)..(1021): n is a, c, g, or t
  misc_feature (1035)..(1036): n is a, c, g, or t
  misc_feature (1038)..(1040): n is a, c, g, or t
  misc_feature (1042)..(1057): n is a, c, g, or t
gatctgcttcctggtcatgcactacagaggacagactgtgaaaggtgtcgctttcctcgcttgctacggcctggtcctgctggtgcttctctcacttctgacgcccttgactgtagtcaccctgctccaggcctccaatgtgcctgctgtggtggtggggaggcttctccaggcagccaccaactaccacaacgggcacacaggccagctctcagccatcacagtcttcctgctgtttgggggctccctggcccgaatcttcacttccattcaggaaaccggagatcccctgatggctgggacctttgtggtctcctctctctgcaacggcctcatcgccgcccagctgctcttctactggaatgcaaagcctccccacaagcagaaaaaggcgcagtagagccagctactggagtcattccgtttccactcattcacccaacctcagggttctccccatctgagccagcctgctggtgtgacttactcatcctccattcctctgcacttgcagactttctgagccagggttttcttttagtggaaacaaatggttgatggatccagatccttagaaaaggagaggatgggggtagagtctcccaagccaaaattttgacatttgagtgctttcgtaagccctgtacatgtactattaattcagtcattcagccaagcctcctcctctagcagcaatttccagctgtgtaacactatcctgggcaaatgttttaccctgtcctccagcctccctgcttcccttctggccctggaagantgantctggacggcaaaatgganggactggnaagctgtggctgcctccctcctcancccggntgggantgtctccggaacccaatgctggggtggggaaagggganngaaaatgactcaggcagggccccagggnggggtgaggagntcctgnctctggcagntctangcgnaaggnaatgnaaatgggctgnttcntgctgcntgagggnaanaaatgggaaaaaaaaatggaaactcnttnaaataaaaaaaaannannnannnnnnnnnnnnnnnn

SEQ ID NO: 360 - DNA, 1064 bp, Homo sapiens
  misc_feature (652)..(652): n is a, c, g, or t
  misc_feature (733)..(733): n is a, c, g, or t
  misc_feature (828)..(828): n is a, c, g, or t
  misc_feature (840)..(840): n is a, c, g, or t
  misc_feature (855)..(855): n is a, c, g, or t
  misc_feature (862)..(862): n is a, c, g, or t
  misc_feature (865)..(865): n is a, c, g, or t
  misc_feature (888)..(888): n is a, c, g, or t
  misc_feature (907)..(907): n is a, c, g, or t
  misc_feature (911)..(912): n is a, c, g, or t
  misc_feature (927)..(927): n is a, c, g, or t
  misc_feature (929)..(929): n is a, c, g, or t
  misc_feature (932)..(932): n is a, c, g, or t
  misc_feature (951)..(951): n is a, c, g, or t
  misc_feature (955)..(955): n is a, c, g, or t
  misc_feature (971)..(971): n is a, c, g, or t
  misc_feature (975)..(975): n is a, c, g, or t
  misc_feature (986)..(986): n is a, c, g, or t
  misc_feature (1000)..(1000): n is a, c, g, or t
  misc_feature (1011)..(1011): n is a, c, g, or t
  misc_feature (1015)..(1015): n is a, c, g, or t
  misc_feature (1017)..(1017): n is a, c, g, or t
  misc_feature (1020)..(1021): n is a, c, g, or t
  misc_feature (1043)..(1043): n is a, c, g, or t
  misc_feature (1052)..(1056): n is a, c, g, or t
  misc_feature (1059)..(1059): n is a, c, g, or t
  misc_feature (1063)..(1063): n is a, c, g, or t
ggacgcgacagcccttctgcagaggccgggctggaggagaagatggcggccaagcagcccccgcctctgatgaagaagcacagccagacggacctcgtgagccgcctgaagacccgcaagatcctcggcgtgggcggggaggatgacgacggggaggtgcatcgctccaagatcagccaggtcttaggcaatgaaatcaagtttaccattcgggagcctttggggctcagggtctggcagttcgtctctgctgtgctcttctccggcattgccatcatggcgcttgccttccctgaccagctctatgatgcggtctttgatggagcccaggtgaccagcaagacccccatccgcctctacggcggtgccctcctcagcatctccctgatcatgtggaacgctctctacacggctgagaaggtcatcattcgatggaccctgctcaccgaagcttgctatttcggggtccagttcttggtggtcactgccacgctagctgagacgggcctcatgtccctggggatcctgctgctcctggtcagccgcctcctttttgtcgtcatcagcatttactactattaccaagtcggccgaagacccaagaaggcctagttgcccgctgggcctggggccctgcccatgcctgggccanagtggcgctggggcctcggcttccctttggctcctggaaggcaggagggtccctgccctgccccagtcctgccccagggangcagggggtgggggggccttcctttcctcctgggcacccccgtgtgctgtgatctcctgggctttcagcttgacatgctggtctgggggaaaaanagggccctctgntgccttggttcttcncccccanagngaaacctccttttccttgggtcncttggcctccaaaaccccntcannaaaaactgaattaantncancttggaatcctaaggttangggntaaatcaagggtccancctncttttgcaagnaaacccttttttgnttttaaaaaanggtngnaannaccccccattctttttttcctnaaattcccnnnnnaantaang

SEQ ID NO: 361 - DNA, 999 bp, Homo sapiens
  misc_feature (829)..(829): n is a, c, g, or t
  misc_feature (846)..(846): n is a, c, g, or t
  misc_feature (865)..(865): n is a, c, g, or t
  misc_feature (872)..(872): n is a, c, g, or t
  misc_feature (894)..(894): n is a, c, g, or t
  misc_feature (904)..(904): n is a, c, g, or t
  misc_feature (939)..(939): n is a, c, g, or t
  misc_feature (943)..(943): n is a, c, g, or t
  misc_feature (955)..(955): n is a, c, g, or t
  misc_feature (961)..(961): n is a, c, g, or t
  misc_feature (976)..(976): n is a, c, g, or t
  misc_feature (999)..(999): n is a, c, g, or t
gcccacgcgtccgcggacctactgggctccatcctgagctccatggagaagccacccagcctcggtgaccaggagactcggcgcaaggcccgagaacaggccgcccgcctgaagaaactacaagagcaagagaaacaacagaaagtggagtttcgtaaaaggatggagaaggaggtgtcagatttcattcaagacagtgggcagatcaagaaaaagtttcagccaatgaacaagatcgagaggagcatactacatgatgtggtggaagtggctggcctgacatccttctcctttggggaagatgatgactgtcgctatgtcatgatcttcaaaaaggagtttgcaccctcagatgaagagctagactcttaccgtcgtggagaggaatgggacccccagaaggctgaggagaagcggaagctgaaggagctggcccagaggcaagaggaggaggcagcccagcaggggcctgtggtggtgagccctgccagcgactacaaggacaagtacagccacctcatcggcaagggagcagccaaagacgcagcccacatgctacaggccaataagacctacggctgtgtgcccgtggccaataagagggacacacgctccattgaagaggctatgaatgagatcagagccaagaagcgtctgcggcagagtggggaagagttgccgccaacctcctaggcgccccgcccagctccctttgacccctggggcagggcagggggcagggaaagacaaggctgctgctattagagcccatcctggagccccacctctgaaccacctcctaccagctgtccctcaggctgggggaaancaggtgttgatttgtcnccgttggagcttggatatntgcctgncatgtgtgtgtgtgtgtgaaantgtgaatgcncaggtgggtatttatctgtattattccccgttctngganttttcttccccntggggnctggggtactttacnttcaataaatactgtttaacccn

SEQ ID NO: 362 - DNA, 991 bp, Homo sapiens
  misc_feature (797)..(797): n is a, c, g, or t
  misc_feature (808)..(808): n is a, c, g, or t
  misc_feature (817)..(817): n is a, c, g, or t
  misc_feature (822)..(823): n is a, c, g, or t
  misc_feature (828)..(828): n is a, c, g, or t
  misc_feature (842)..(842): n is a, c, g, or t
  misc_feature (846)..(847): n is a, c, g, or t
  misc_feature (855)..(855): n is a, c, g, or t
  misc_feature (871)..(871): n is a, c, g, or t
  misc_feature (887)..(887): n is a, c, g, or t
  misc_feature (904)..(904): n is a, c, g, or t
  misc_feature (910)..(911): n is a, c, g, or t
  misc_feature (920)..(920): n is a, c, g, or t
  misc_feature (924)..(926): n is a, c, g, or t
  misc_feature (935)..(935): n is a, c, g, or t
  misc_feature (937)..(937): n is a, c, g, or t
  misc_feature (952)..(953): n is a, c, g, or t
  misc_feature (957)..(957): n is a, c, g, or t
  misc_feature (962)..(962): n is a, c, g, or t
  misc_feature (968)..(968): n is a, c, g, or t
  misc_feature (972)..(972): n is a, c, g, or t
  misc_feature (976)..(976): n is a, c, g, or t
  misc_feature (988)..(988): n is a, c, g, or t
  misc_feature (990)..(991): n is a, c, g, or t
gtacccaacatccaccccgagttgctagcgaagaagcggggatccaaaggaaagttggaagccatcatcacaccacccccagccaaaaaggccaagtctccatcccagaagaagcctgtatctaaaaaagcaggaggcaagaaaggggcccggaaatccaagaagcagggtgaagtcagtaaggcagccagcgccgacagcacaaccgagggcacacctgccgacggcttcacagtcctctccaccaagagcctcttccttggccagaagctgaaccttattcacagtgaaatcagtaatttagccggctttgaggtggaggccataatcaatcctaccaatgctgacattgaccttaaagatgacctaggaaacacgctggagaagaaaggtggcaaggagtttgtggaagctgtcctggaactccggaaaaagaacgggcccttggaagtagctggagctgctgtcagcgcaggccatggcctgcctgccaagtttgtgatccactgtaatagtccagtttggggtgcagacaagtgtgaagaacttctggaaaagacagtgaaaaactgcttggccctggctgatgataagaagctgaaatccattgcatttccatccatcggcagcggcaggaacggttttccaaagcagacagcagctcagctgattctgaaggccatctccagttacttcgtgtctacaatgtcctcttccatcaaaacggtgtacttcgtgcttttttgacagcgagagtataggcatctatgtgcaggaaatggccaagctggacgccnactaggctgancaatgacanaaccnnctgcnccatgtaccccacnttcnntttaaaanaaaaaaaaaatccccnttccctcctactgggnggggggaacccctttcnttttcnnttttgctcnttcnnngggaaaatnanggttttggtttcccnntttnattgntttttnaccnttcnaaaatgtttttntnn

SEQ ID NO: 363 - DNA, 1003 bp, Homo sapiens
  misc_feature (859)..(859): n is a, c, g, or t
  misc_feature (862)..(862): n is a, c, g, or t
  misc_feature (891)..(891): n is a, c, g, or t
  misc_feature (894)..(894): n is a, c, g, or t
  misc_feature (900)..(900): n is a, c, g, or t
  misc_feature (904)..(904): n is a, c, g, or t
  misc_feature (908)..(908): n is a, c, g, or t
  misc_feature (912)..(912): n is a, c, g, or t
  misc_feature (917)..(917): n is a, c, g, or t
  misc_feature (930)..(930): n is a, c, g, or t
  misc_feature (933)..(933): n is a, c, g, or t
  misc_feature (949)..(949): n is a, c, g, or t
  misc_feature (960)..(960): n is a, c, g, or t
  misc_feature (965)..(965): n is a, c, g, or t
  misc_feature (970)..(970): n is a, c, g, or t
  misc_feature (975)..(975): n is a, c, g, or t
  misc_feature (983)..(983): n is a, c, g, or t
  misc_feature (988)..(988): n is a, c, g, or t
  misc_feature (991)..(992): n is a, c, g, or t
  misc_feature (994)..(995): n is a, c, g, or t
  misc_feature (998)..(999): n is a, c, g, or t
  misc_feature (1002)..(1003): n is a, c, g, or t
gcccacgcgtccgctgctcgcatgctggcccagcgcatggccaagtgcaacacaggcagtgaggggtccgaggcccagccccccgggaaaccgagcaccgaggcccggtctgcggccagcaacactggcacccccgatgggcctgaggcccccccaggcccagatgcctcccccgatgccagctttgggaagcagtggtcctcatcctcccgttcctcctactcatcccaacatggaggggctgtgtctccccagagcttgtctgagtggcgcatgcagaacattgcccgagactctgagaacagctccgaggaagagttctttgatgcccacgaaggcttctcggacagtgaggaggtcttccccaaggagatgaccaagtggaactccaatgacttcattgatgcctttgcctccccagtggaggcagagggaacgccagagcctggagccgaggcagctaaaggcattgaggatggggcccaagcacccagggactcagagggcctggatggagccggggagctgggggctgaggcatgcgcagtccacgccctcttccttatcctgcacagcggcaacatcctggactcaggccctggagacgccaactccaagcaggcggatgtgcagacgctgagctccgccttcgaggccgtcacccgcatccacttccctgaggccttgggccacgtggcgctgcgactggtgccctgtccacccatctgcgccgccgcctatgcccttgtctccaacctgagcccttacagccacgatggggacagcctgtctcgctcccaaaaccacattccactggctgcccctgccactgctggccacctcatcctccccgctacanggngccgtggccaccgtcattgcccgcacaancangcctantcancttnctgngctcnctgaaggtgccgnttntgtggcaggtccactnattgaaatggngtggnggcanctggntttaagcnttgcnaanngnnaannggnn

SEQ ID NO: 364 - DNA, 648 bp, Homo sapiens
  misc_feature (598)..(598): n is a, c, g, or t
  misc_feature (610)..(610): n is a, c, g, or t
  misc_feature (615)..(616): n is a, c, g, or t
  misc_feature (621)..(621): n is a, c, g, or t
  misc_feature (626)..(626): n is a, c, g, or t
  misc_feature (629)..(629): n is a, c, g, or t
  misc_feature (631)..(631): n is a, c, g, or t
  misc_feature (637)..(638): n is a, c, g, or t
  misc_feature (648)..(648): n is a, c, g, or t
ggccagccgccagccttcttcagcaagctgaccgagagcaactccgccatggtcaagtccaagaagcaagagatcaacaagaagctgaacacccacaaccggaatgagcctgaatacaatatcagccagcctgggacggagatcttcaatatgcccgccatcaccggaacaggccttatgacctatagaagccaggcggtgcaggaacatgccagcaccaacatggggctggaggccataattagaaaggcactcatgggtggcggcgggaaggccaaggtctctggcagacccagcagccgaaaagccaagtccccggccccgggcctggcatctggggaccggccaccctctgtctcctcagtgcactcggagggagactgcaaccgccggacgccgctcaccaaccgcgtgtgggaggacaggccctcgtccgcaggttccacgccattcccctacaaccccctgatcatgcggctgcaggcgggtgtcatggcttccccacccccaccgggcctccccgcgggcagcgggcccctcgctggcccccaccacgcctgggacgaggagcccaagccactgctctgctcgcattacnagacactctccnacagnnagtgnctcanaananggcggnngggggggggn

SEQ ID NO: 365 - DNA, 1168 bp, Homo sapiens
  misc_feature (764)..(764): n is a, c, g, or t
  misc_feature (769)..(769): n is a, c, g, or t
  misc_feature (846)..(846): n is a, c, g, or t
  misc_feature (850)..(850): n is a, c, g, or t
  misc_feature (852)..(852): n is a, c, g, or t
  misc_feature (891)..(891): n is a, c, g, or t
  misc_feature (907)..(907): n is a, c, g, or t
  misc_feature (932)..(932): n is a, c, g, or t
  misc_feature (942)..(942): n is a, c, g, or t
  misc_feature (946)..(946): n is a, c, g, or t
  misc_feature (964)..(964): n is a, c, g, or t
  misc_feature (967)..(967): n is a, c, g, or t
  misc_feature (986)..(986): n is a, c, g, or t
  misc_feature (990)..(990): n is a, c, g, or t
  misc_feature (997)..(997): n is a, c, g, or t
  misc_feature (1001)..(1001): n is a, c, g, or t
  misc_feature (1010)..(1010): n is a, c, g, or t
  misc_feature (1021)..(1021): n is a, c, g, or t
  misc_feature (1040)..(1040): n is a, c, g, or t
  misc_feature (1053)..(1053): n is a, c, g, or t
  misc_feature (1056)..(1056): n is a, c, g, or t
  misc_feature (1062)..(1062): n is a, c, g, or t
  misc_feature (1064)..(1064): n is a, c, g, or t
  misc_feature (1070)..(1070): n is a, c, g, or t
  misc_feature (1082)..(1082): n is a, c, g, or t
  misc_feature (1096)..(1097): n is a, c, g, or t
  misc_feature (1099)..(1099): n is a, c, g, or t
  misc_feature (1104)..(1104): n is a, c, g, or t
  misc_feature (1106)..(1106): n is a, c, g, or t
  misc_feature (1108)..(1108): n is a, c, g, or t
  misc_feature (1110)..(1110): n is a, c, g, or t
  misc_feature (1123)..(1123): n is a, c, g, or t
  misc_feature (1132)..(1132): n is a, c, g, or t
  misc_feature (1141)..(1141): n is a, c, g, or t
  misc_feature (1143)..(1143): n is a, c, g, or t
  misc_feature (1145)..(1145): n is a, c, g, or t
  misc_feature (1154)..(1154): n is a, c, g, or t
  misc_feature (1159)..(1160): n is a, c, g, or t
  misc_feature (1167)..(1167): n is a, c, g, or t
gggctgcctgttgcctgccccaaccaatgtggtgtgggcactgtggctcgggaggacctgccaggccatctgaaggacagctgtaacaccgccctggtgctctgcccattcaaagactccggctgcaagcacaggtgccctaagctggcaatggcacggcatgtggaggagagtgtgaagccacatctggccatgatgtgtgccctggtgagccggcaacggcaggagctgcaggagcttcggcgagagctggaggagctatcagtgggcagtgatggcgtgctcatctggaagattggcagctatggacggcggctacaggaggccaaggccaagcccaaccttgagtgcttcagcccagccttctacacacataagtatggttacaagctgcaggtgtctgcattcctcaatggcaatggcagtggtgagggcacacacctctcactgtacattcgtgtgctgcctggtgcctttgacaatctccttgagtggccctttgcccgccgtgtcaccttctccctgctggatcagagcgaccctgggctggctaaaccacagcacgtcactgagaccttccaccccgacccaaactggaagaatttccagaagccaggcacgtggcggggctccctggatgagagttctctgggctttggttatcccaagttcatctcccaccaggacattcgaaagcgaaactatgtgcgggatgatgcagtcttcatccgtgctgctgttgaactgccccggaagatcctcanctgantgcaggtggggttcgagggggaaaggacgatggggcatgacctcagtcaggcactggctgaacttggaaaagggggnccgnanccccgtcagctgcttctgctgcctaagttctgttacccnatcttccctcccccancaacaaccctcaggtgcctccaatnggtgcttcancccntggcccctgtggggaaanagntcttggggtcatgaaaggnttgnaaaaaantgancccagggcntgtttcccttnttggtaaggcaaaaatgcntggtgccggtcanccntaacgnantgaggngcctgcccaggntattcccaaaaccnnanggggngnantngggaggaaaaggnattcaaaancgcttgaananantttcccctnaaaannggccccnc

SEQ ID NO: 366 - DNA, 766 bp, Homo sapiens
  misc_feature (723)..(723): n is a, c, g, or t
  misc_feature (731)..(731): n is a, c, g, or t
  misc_feature (739)..(739): n is a, c, g, or t
  misc_feature (745)..(748): n is a, c, g, or t
  misc_feature (750)..(750): n is a, c, g, or t
  misc_feature (753)..(753): n is a, c, g, or t
  misc_feature (760)..(760): n is a, c, g, or t
  misc_feature (764)..(764): n is a, c, g, or t
  misc_feature (766)..(766): n is a, c, g, or t
gtctacataaagattccacaggttccactgctgtgtcagctacaagggtgagaagaacagtgtggactggggtgaccttaacctggtgctgccctgtctggagtaccacaacaacacatggacatggctagactttgccatggctgtcaaaagggacagccgcaaagccctggttgcccaggtaatcaaagagaagctaaggctgaagtctgcaacaggctctgaggtccggggaaagctagaaactaaatcggacctgaacatgcaacagcaggaagaggaggagaaagcccggctcctcattggtttaagtgtgggcgacaagaaccctggcaagaagtccatctttggcaggcgcaaatgatttggcgattcgagtggctgcagtacaggatctgactctggctcaggctccagggacttgtggggtgggaggggcttcccgttatccacgaggatttgtgggtgtcagagcccataggcatcactcttcagcacctggtctgttcgctgcagggcatggtggacagtaatgctgagttctgtctcacactgatcaggctcagggccagagaggcaacaagagagcaagacccagggaatgggcccagggcaggaccctattcccttggggtcaagtgaaagggtagggggatagtcctgatcaagtgtgataaatttttatagacatatataaatatatatatattatatatataaaanaaaaaaanaaaaaaanaataannnncnccnatataanatanan

SEQ ID NO: 367 - DNA, 1057 bp, Homo sapiens
  misc_feature (823)..(823): n is a, c, g, or t
  misc_feature (830)..(830): n is a, c, g, or t
  misc_feature (837)..(837): n is a, c, g, or t
  misc_feature (839)..(839): n is a, c, g, or t
  misc_feature (847)..(847): n is a, c, g, or t
  misc_feature (850)..(850): n is a, c, g, or t
  misc_feature (860)..(860): n is a, c, g, or t
  misc_feature (901)..(901): n is a, c, g, or t
  misc_feature (925)..(925): n is a, c, g, or t
  misc_feature (930)..(930): n is a, c, g, or t
  misc_feature (943)..(943): n is a, c, g, or t
  misc_feature (948)..(948): n is a, c, g, or t
  misc_feature (950)..(950): n is a, c, g, or t
  misc_feature (956)..(956): n is a, c, g, or t
  misc_feature (965)..(965): n is a, c, g, or t
  misc_feature (967)..(967): n is a, c, g, or t
  misc_feature (971)..(971): n is a, c, g, or t
  misc_feature (990)..(990): n is a, c, g, or t
  misc_feature (999)..(999): n is a, c, g, or t
  misc_feature (1004)..(1004): n is a, c, g, or t
  misc_feature (1014)..(1014): n is a, c, g, or t
  misc_feature (1019)..(1019): n is a, c, g, or t
  misc_feature (1024)..(1024): n is a, c, g, or t
  misc_feature (1028)..(1028): n is a, c, g, or t
  misc_feature (1030)..(1031): n is a, c, g, or t
  misc_feature (1035)..(1035): n is a, c, g, or t
  misc_feature (1047)..(1047): n is a, c, g, or t
  misc_feature (1050)..(1050): n is a, c, g, or t
  misc_feature (1052)..(1052): n is a, c, g, or t
  misc_feature (1054)..(1055): n is a, c, g, or t
ggccaagaaggaggcccgcctgttacgatggtgtccatgagtttcaagcggaaccgcagtgaccggttctacagcacccggtgctgcggctgttgccatgtccgcaccgggacgatcatcctggggacctggtacatggtagtaaacctattgatggcaattttgctgactgtggaagtgactcatccaaactccatgccagctgtcaacattcagtatgaagtcatcggtaattactattcgtctgagagaatggctgataatgcctgtgttctttttgccgtctctgttcttatgtttataatcagttcaatgctggtttatggagcaatttcttatcaagtgggttggctgattccattcttctgttaccgactttttgacttcgtcctcagttgcctggttgctattagttctctcacctatttgccaagaatcaaagaatatctggatcaactacctgattttccctacaaagatgacctcctggccttggactccagctgcctcctgttcattgttcttgtgttctttgccttattcatcatttttaaggcttatctaattaactgtgtttggaactgctataaatacatcaacaaccgaaacgtgccggagattgctgtgtaccctgcctttgaagcacctcctcagtacgttttgccaacctatgaaatggccgtgaaaatgcctgaaaaagaaccaccacctccttacttacctgcctgaagaaattctgcctttgacaataaatcctataccagctttttgtttgtttatgttacagaatgctgcaattcagggctcttcaaacttgtttganaaaaaanatgttgncntttggttnaancatttatttncaacactaaggagcttttgacatctgttaaacgccttttgnttttttggtaagcctttacatttnaaaantttttgaaaaaanctagntnaacaanaacaaaggncnttgnttgcctttaattggggggngggaaaggnaaaanggaactgccnaaaanttccntttnanngccnttctttaaaaanccntngnntt

SEQ ID NO: 368 - DNA, 1091 bp, Homo sapiens
  misc_feature (829)..(829): n is a, c, g, or t
  misc_feature (852)..(852): n is a, c, g, or t
  misc_feature (861)..(861): n is a, c, g, or t
  misc_feature (873)..(873): n is a, c, g, or t
  misc_feature (900)..(900): n is a, c, g, or t
  misc_feature (913)..(913): n is a, c, g, or t
  misc_feature (916)..(916): n is a, c, g, or t
  misc_feature (920)..(920): n is a, c, g, or t
  misc_feature (933)..(933): n is a, c, g, or t
  misc_feature (939)..(939): n is a, c, g, or t
  misc_feature (941)..(941): n is a, c, g, or t
  misc_feature (962)..(962): n is a, c, g, or t
  misc_feature (970)..(970): n is a, c, g, or t
  misc_feature (983)..(983): n is a, c, g, or t
  misc_feature (997)..(997): n is a, c, g, or t
  misc_feature (1010)..(1010): n is a, c, g, or t
  misc_feature (1019)..(1020): n is a, c, g, or t
  misc_feature (1025)..(1025): n is a, c, g, or t
  misc_feature (1027)..(1027): n is a, c, g, or t
  misc_feature (1033)..(1033): n is a, c, g, or t
  misc_feature (1036)..(1036): n is a, c, g, or t
  misc_feature (1057)..(1057): n is a, c, g, or t
  misc_feature (1074)..(1075): n is a, c, g, or t
  misc_feature (1083)..(1083): n is a, c, g, or t
gaggagacacagcaggtccccacagaggaagtgtccttggaagtgctgctcagcaacgggcagaaagttctggtcaacgtgctaacttcagatcagactgaggatgtcctggaggctgtagctgcaaagctggatcttccagatgacttgattggatactttagtctattcttagttcgagaaaaagaggatggagccttttcttttgtacggaagttgcaagagtttgagctgccttatgtgtctgtcaccagccttcggagtcaagagtataagattgtgctaaggaagagttattgggactctgcctatgatgacgatgtcatggagaaccgggttggcctgaacctgctttatgctcagacggtatcagatattgagcgtgggtggatcttggtcaccaaggaacagcaccggcaactcaaatctctgcaagagaaagtctccaagaaggagttcctgagactggcccagacgctgcggcactatggctacttgcgctttgatgcctgtgtggctgacttcccagaaaaggactgtcctgtggtggtgagcgcgggcaacagtgagctcagcctgcagctccgcctgcctggccagcaactccgagaaggctccttccgggtcacccgcatgcgatgctggcgggtcacctcctctgtaccattgcccagtggaagcacgagcagcccaggccggggccggggtgaggtgcgcctggaactggcttttgaatacctcatgagcaaggaccggctacagtgggtcaccatcactagccccccaggctatcatgatgagcatctgcttgcagtccatggttgatganctgatgggggaaaaatctggcgncagtatcangaaaatgctgcnccggcggggggggggtactctgaaacnctcaaacagccancangcantgaagtccccccnctgctngngtccctgatgccccccgggantctatggncaacctcccaatnacctgaaatgccgngaacttgccgggnaattggcanncccancnaaaatnccnggcccgtgatgccccgggcanttccccctccaagggcnntggaaaanaaaatctg

SEQ ID NO: 369 - DNA, 879 bp, Homo sapiens
  misc_feature (809)..(809): n is a, c, g, or t
  misc_feature (835)..(835): n is a, c, g, or t
  misc_feature (856)..(856): n is a, c, g, or t
ggctgcctatttccaccaagcagccaagctcaagggaatcggggagtacgtgaacatccgcacagggatgccctgccacttgcaccccaccagctccctttttggaatgggctacaccccagattacatagtgtatcacgagttggtcatgaccaccaaggagtatatgcagtgtgtgaccgctgtggacggggagtggctggcggagctgggccccatgttctatagcgtgaaacaggcgggcaagtcacggcaggagaaccgtcgtcgggccaaagaggaagcctctgccatggaggaggagatggcgctggccgaggagcagctgcgagcccggcggcaggagcaggagaagcgcagccccctgggcagtgtcaggtctacgaagatctacactccaggccggaaagagcaaggggagcccatgacccctcgccgcacgccagcccgctttggtctgtgagctgaggctgtccccagagaggatggcagcaggtattgggtcctcagccttctggcgggagccctgaggctgcggacaaagccctttcatctgaggactttcatctgtgcatatcacggccccccagggcagttcctgctggaccagactctctggcagaggaggtggagttcttccatgcaggagcacggcatggcgggagcggggctgcagagtatccgaggtgctgccggggcagcgggaggtggctggacccatcgcatctaaaactggcccaggacacttggtgtatgcgtgacttggctgtggctgtcttttttaatccttgtgtaaagcagcaaaaaanacctaaagggaattgtaatttgggtnataattcaggatttggaaatnaaattttttatttgtaaaacatg

SEQ ID NO: 370 - DNA, 1018 bp, Homo sapiens
  misc_feature (628)..(628): n is a, c, g, or t
  misc_feature (699)..(699): n is a, c, g, or t
  misc_feature (719)..(719): n is a, c, g, or t
  misc_feature (781)..(781): n is a, c, g, or t
  misc_feature (795)..(795): n is a, c, g, or t
  misc_feature (839)..(839): n is a, c, g, or t
  misc_feature (842)..(842): n is a, c, g, or t
  misc_feature (858)..(858): n is a, c, g, or t
  misc_feature (876)..(876): n is a, c, g, or t
  misc_feature (879)..(879): n is a, c, g, or t
  misc_feature (883)..(883): n is a, c, g, or t
  misc_feature (890)..(890): n is a, c, g, or t
  misc_feature (893)..(893): n is a, c, g, or t
  misc_feature (903)..(903): n is a, c, g, or t
  misc_feature (907)..(907): n is a, c, g, or t
  misc_feature (909)..(909): n is a, c, g, or t
  misc_feature (914)..(914): n is a, c, g, or t
  misc_feature (921)..(921): n is a, c, g, or t
  misc_feature (928)..(928): n is a, c, g, or t
  misc_feature (930)..(931): n is a, c, g, or t
  misc_feature (940)..(940): n is a, c, g, or t
  misc_feature (946)..(946): n is a, c, g, or t
  misc_feature (951)..(951): n is a, c, g, or t
  misc_feature (980)..(981): n is a, c, g, or t
  misc_feature (985)..(985): n is a, c, g, or t
  misc_feature (988)..(988): n is a, c, g, or t
  misc_feature (993)..(994): n is a, c, g, or t
  misc_feature (996)..(996): n is a, c, g, or t
  misc_feature (999)..(999): n is a, c, g, or t
  misc_feature (1007)..(1007): n is a, c, g, or t
  misc_feature (1014)..(1014): n is a, c, g, or t
gcggacgcgtgggtgcaccacttcaagtacccctgcgtgttggacctgaagatgggcacgcggcagcatggcgatgacgcgtcagctgagaaggcagcccggcagatgcggaaatgcgagcagagcacatcagccacgctgggcgtcagggtctgcggcatgcaggtgtaccagctggacacagggcattacctctgcaggaacaagtactatggccgtgggctctccattgaaggcttccgcaatgccctctatcaatatctgcacaatggcctggacctgcgacgtgacctgtttgagcctatcctgagcaaactgcggggcctgaaagctgtgctggagcggcaggcctcttaccgcttctactccagttccctgcttgtcatctatgatggcaaggagtgccgggctgagtcctgcctggaccgccggtctgagatgcgtctcaagcacctggacatggtgctccctgaggtggcgtcatcctgtggccccagcaccagccccagcaacaccagccccgaggcgggtccctcctctcagcccaaggtggatgtccgcatgattgactttgcacacagcacattcaagggcttccgggatgaccccaccgtgcatgatgggccanacagaggctacgtgtttggcctggagaacctcatcagcatcatggaacagatgcgggacgagaaccagtangccctgttctgggcccccanaaccccttcctctccactgcaggcagggaccattgttctgaacttgccgtgaggacacacanacttgcttttaaanggttatattttctctttggtgtaaactaaaaaaaatgtttttanctngtaacctggaaatccntaatatataaaagtgaangangggnaaaccanacncccttcttanccangntcctnaactttnggggctntnnaatgggggngtccangcttnccttaaaaaaaaaaaaagtgccccctggnngggnttnggcannanggnaaaagggngcccttnggaa

SEQ ID NO: 371 - DNA, 956 bp, Homo sapiens
  misc_feature (637)..(637): n is a, c, g, or t
  misc_feature (681)..(681): n is a, c, g, or t
  misc_feature (706)..(706): n is a, c, g, or t
  misc_feature (749)..(749): n is a, c, g, or t
  misc_feature (777)..(777): n is a, c, g, or t
  misc_feature (790)..(790): n is a, c, g, or t
  misc_feature (819)..(819): n is a, c, g, or t
  misc_feature (841)..(841): n is a, c, g, or t
  misc_feature (850)..(850): n is a, c, g, or t
  misc_feature (853)..(853): n is a, c, g, or t
  misc_feature (863)..(863): n is a, c, g, or t
  misc_feature (873)..(873): n is a, c, g, or t
  misc_feature (876)..(876): n is a, c, g, or t
  misc_feature (879)..(879): n is a, c, g, or t
  misc_feature (881)..(881): n is a, c, g, or t
  misc_feature (905)..(905): n is a, c, g, or t
  misc_feature (914)..(915): n is a, c, g, or t
  misc_feature (918)..(918): n is a, c, g, or t
  misc_feature (925)..(925): n is a, c, g, or t
  misc_feature (927)..(927): n is a, c, g, or t
  misc_feature (931)..(931): n is a, c, g, or t
  misc_feature (934)..(934): n is a, c, g, or t
  misc_feature (936)..(936): n is a, c, g, or t
  misc_feature (946)..(946): n is a, c, g, or t
  misc_feature (950)..(950): n is a, c, g, or t
  misc_feature (955)..(955): n is a, c, g, or t
gaggaaccccagagccgggtgaagtggtcagaggcacagttctcctgtgaacagcaagaggcccagctggtcaccatcacaaaccccttagagcaagcattcatcacagccagcctgcccaatgtgacctttgacctttggattggcctccatgcctcgcagagggacttccagtgggtggagcaggagcctttgatgtatgccaactgggcacctggggagccctctggccctagccctgctcccagtggcaacaaaccgaccagctgtgcggtggtcctgcacagcccctcagcccacttcactggccgctgggacgatcggagctgcacggaggagacccatggcttcatctgccagaagggcacggacccctccctgagcccgtccccagcagcgctgccccccgccccgggcactgagctctcctacctcaacggcaccttccggctgcttcagaagccgctgcgctggcacgatgccctcctgctgtgtgagagccacaatgccagcctggcctacgtgcccgacccctacacccaggccttcctcacgcaggctgcccgagggctgcgcacgccgctctggattgggctggctggcgaggagggctctcggcggtactcctgggtctcanaggagccgctgaactacgtgggctggcaggacggggagccgcancagccggggggctgtacctacgtanatgtggacggggccctggcgcaacaccaactgtgaacaccaanctgcaagggggctgtgtgtggggtttancaatgggcccccntcctccccgaaaaataacctaaccatggncagctgttccccagggactggnaaactcccncgnggaattcccnttccgggaancantgntnttttttttcaaatggaacttgctncttgggccnnaangaaggcncnaaanccntnccaaaaaacngggnggggnc

SEQ ID NO: 372 - DNA, 781 bp, Homo sapiens
  misc_feature (499)..(499): n is a, c, g, or t
  misc_feature (526)..(526): n is a, c, g, or t
  misc_feature (573)..(573): n is a, c, g, or t
  misc_feature (613)..(613): n is a, c, g, or t
  misc_feature (642)..(642): n is a, c, g, or t
  misc_feature (652)..(652): n is a, c, g, or t
  misc_feature (655)..(655): n is a, c, g, or t
  misc_feature (663)..(663): n is a, c, g, or t
  misc_feature (666)..(666): n is a, c, g, or t
  misc_feature (669)..(669): n is a, c, g, or t
  misc_feature (671)..(671): n is a, c, g, or t
  misc_feature (674)..(674): n is a, c, g, or t
  misc_feature (695)..(695): n is a, c, g, or t
  misc_feature (703)..(703): n is a, c, g, or t
  misc_feature (737)..(737): n is a, c, g, or t
  misc_feature (741)..(742): n is a, c, g, or t
  misc_feature (747)..(747): n is a, c, g, or t
  misc_feature (750)..(750): n is a, c, g, or t
  misc_feature (753)..(753): n is a, c, g, or t
  misc_feature (760)..(760): n is a, c, g, or t
  misc_feature (762)..(762): n is a, c, g, or t
  misc_feature (768)..(768): n is a, c, g, or t
  misc_feature (774)..(774): n is a, c, g, or t
  misc_feature (781)..(781): n is a, c, g, or t
gcctcgacaacctatcgaaggcgccatggagcgaccggcgcccctggccgtgcttcccttctcggaccccgcgcacgccctgagcctgctgcgcggcctgagccagctgcgcgccgagcgcaagttcctggacgtgaccctggaggcggcgggcgggcgcgacttcccggcgcaccgtgcggtgctggccgccgccagcccctacttccgcgccatgttcgcggggcagctgcgcgagagccgcgccgagcgggtgcgcctgcacggagtgcctcccgacatgctgcagctgctgctggacttcagctacacgggccgcgtggcggtaagcggcgacaacgctgagccgctgctgcgcgccgccgacctgctgcagttcccggccgtgaaggaggcgtgcggggccttcctgcagcagcagctcgacctggccaactgcctggacatgcaggacttcgctgaggccttcagctgctcgggactggcgagcgcggcgcancggttcattctgcgccacgtgggcganctgggcgccgagcagctggagcggctgccactggcgcgcctgctgcnctacctgcgggacgacgggctgtgtgtgcccaaggaggangccgcctaccagctggcgctgcgctgggnccgcgctganccnccgcgccncgncgngncanttgggccgcaactgctggaangccgtgcncctgcccttcgttgcgcccgcttctacctgatgncgcnnattcnagnccnaacccgntngtggangcgctncccaccn

SEQ ID NO: 373 - DNA, 1035 bp, Homo sapiens
  misc_feature (691)..(691): n is a, c, g, or t
  misc_feature (848)..(848): n is a, c, g, or t
  misc_feature (860)..(860): n is a, c, g, or t
  misc_feature (871)..(871): n is a, c, g, or t
  misc_feature (876)..(876): n is a, c, g, or t
  misc_feature (883)..(883): n is a, c, g, or t
  misc_feature (892)..(892): n is a, c, g, or t
  misc_feature (905)..(905): n is a, c, g, or t
  misc_feature (916)..(916): n is a, c, g, or t
  misc_feature (918)..(918): n is a, c, g, or t
  misc_feature (927)..(927): n is a, c, g, or t
  misc_feature (932)..(932): n is a, c, g, or t
  misc_feature (947)..(947): n is a, c, g, or t
  misc_feature (950)..(950): n is a, c, g, or t
  misc_feature (953)..(953): n is a, c, g, or t
  misc_feature (958)..(958): n is a, c, g, or t
  misc_feature (967)..(967): n is a, c, g, or t
  misc_feature (972)..(972): n is a, c, g, or t
  misc_feature (974)..(974): n is a, c, g, or t
  misc_feature (994)..(995): n is a, c, g, or t
  misc_feature (998)..(1000): n is a, c, g, or t
  misc_feature (1002)..(1002): n is a, c, g, or t
  misc_feature (1005)..(1006): n is a, c, g, or t
  misc_feature (1008)..(1008): n is a, c, g, or t
  misc_feature (1013)..(1014): n is a, c, g, or t
  misc_feature (1016)..(1017): n is a, c, g, or t
  misc_feature (1025)..(1025): n is a, c, g, or t
  misc_feature (1029)..(1029): n is a, c, g, or t
  misc_feature (1034)..(1034): n is a, c, g, or t
gggatcattgaacctatcatccagcatgcagactggttcttccctggggagatagagttcaacattactggcaattatgggagtccagtacacgtgaaccataatgccaactacagctcaatgccctccccagacatggaccctgctgaccggcgccagcccgagcaggcccgccggcccctcagtgtcgccacggataatatgatgctggagttttacaaaaaggatggcatgggtgtgagggtcatggacacaaactgggtggctcgaagaggctcctcggccggtcggaaagtgtcctgcgccccgccctccatgcagcctcccgccccgcccgccgagctggctgcgcccctgccttcgccgctgccggagcagcccctggacagccccgcggcccccgcgctctctccatccggcctgggcctccagcctgggcccgagcgcaccagcacaacaaaaagcaaggaactttctccaggctctgcacagaaaggaagtccaggctccagccagggcacagcctgtgcagggactcaaccaggggctcaacctggagctcagccgggcgccagccccagccccagccagccgcctgcagaccagagtcctcacaccctccggaaagtttcaaagaagctggcaccgattccacccaaggtcccctttggccagccgggggctatggcanaccagtccgctggccagccgtccccagtcagcctgtcccccaccccgcccagcaccccgtcaccctatggactgagctaccctcaggggtactccttggcctcgggccagctctccccagctgcagctcctcccctggcctctccttctgtctttanaagcactttgancaaatcgcggncccantcctaanccgcgaaanaaaactaatctgncgcctcctcancntcccaaagnaaacntctcgcctctaatcnaantcnaggangcccccagntaaangnatgtccctgggaaaacatgnntannntntgnnanatganngnncattttgnaaantggang

SEQ ID NO: 374 - DNA, 1134 bp, Homo sapiens
  misc_feature (816)..(816): n is a, c, g, or t
  misc_feature (841)..(841): n is a, c, g, or t
  misc_feature (865)..(865): n is a, c, g, or t
  misc_feature (878)..(878): n is a, c, g, or t
  misc_feature (884)..(884): n is a, c, g, or t
  misc_feature (890)..(890): n is a, c, g, or t
  misc_feature (936)..(936): n is a, c, g, or t
  misc_feature (947)..(947): n is a, c, g, or t
  misc_feature (953)..(953): n is a, c, g, or t
  misc_feature (956)..(956): n is a, c, g, or t
  misc_feature (965)..(965): n is a, c, g, or t
  misc_feature (978)..(978): n is a, c, g, or t
  misc_feature (983)..(983): n is a, c, g, or t
  misc_feature (1002)..(1002): n is a, c, g, or t
  misc_feature (1005)..(1005): n is a, c, g, or t
  misc_feature (1017)..(1017): n is a, c, g, or t
  misc_feature (1019)..(1019): n is a, c, g, or t
  misc_feature (1025)..(1026): n is a, c, g, or t
  misc_feature (1032)..(1032): n is a, c, g, or t
  misc_feature (1046)..(1046): n is a, c, g, or t
  misc_feature (1050)..(1050): n is a, c, g, or t
  misc_feature (1057)..(1057): n is a, c, g, or t
  misc_feature (1070)..(1071): n is a, c, g, or t
  misc_feature (1075)..(1075): n is a, c, g, or t
  misc_feature (1077)..(1077): n is a, c, g, or t
  misc_feature (1080)..(1080): n is a, c, g, or t
  misc_feature (1083)..(1083): n is a, c, g, or t
  misc_feature (1086)..(1086): n is a, c, g, or t
  misc_feature (1100)..(1100): n is a, c, g, or t
  misc_feature (1105)..(1105): n is a, c, g, or t
  misc_feature (1124)..(1125): n is a, c, g, or t
  misc_feature (1128)..(1128): n is a, c, g, or t
  misc_feature (1133)..(1134): n is a, c, g, or t
gcggctagaagcgacaccagacggagcctccggagttcctccgcccccacctcgccgggtcctggagccgcagtcctcccagctgccctcctcgtggccatggagtgtccacacctgagctccagcgtctgcattgctccggactcagccaagttccccaacggctccccgtcgtcctggtgctgcagcgccttcaaatgtttatctggtgtgactgtattatgccctcagagagtactgtatgttgcccaggctggcctcgaactctaggctcaagtgattcttctgcctcagcctcccaagtagctgggactacagatgcaatcaccaccacacttggcagtgtgccggtccaacaaaagcccttgggtctgtttgacttgttcaagtgtccactgtggaaggtatgtgaatggccatgcaaaaaaacattatgaagatgcacaagtacctttaaccaaccataagaaatcagaaaagcaagataaagttcagcacacagtatgtatggattgcagtagctacagtacatactgttatcgctgtgatgattttgtggttaatgacaccaagctgggactggtacagaaagtcagagaacacttacagaacttggaaaactcagctttcacagctgacaggcataagaaaagaaaacttttggaaaactcaacactaaacagcaagttattaaaagtaaatggaagcaccactgccatttgtgccacaggccttcggaatttggggaacacatgtttcatgaatgccatccttcagtcactcagtaacattgagcagttttgctgttattcaaanaactgccccccgtggagttaaggantgggaaaacagcaggaaggcgganataccacaccagnagccangggganaaaatgtgtctttggtaaaaaaattaaaaaaaaactctgtgctttntggcaaggcanccaaantgnatttaaccnaaatccttatttnatgtngtttggaaaatatgccaanttnaggggctatcanancagganncccatnaattctgccctacntttngaacacntaacttggaattnngggngnttnaanggntttccccctaaaantttgnagaaaatttattctttttnnaanaaaann

SEQ ID NO: 375 - DNA, 1085 bp, Homo sapiens
  misc_feature (793)..(793): n is a, c, g, or t
  misc_feature (834)..(834): n is a, c, g, or t
  misc_feature (844)..(844): n is a, c, g, or t
  misc_feature (860)..(860): n is a, c, g, or t
  misc_feature (864)..(865): n is a, c, g, or t
  misc_feature (869)..(869): n is a, c, g, or t
  misc_feature (878)..(878): n is a, c, g, or t
  misc_feature (892)..(892): n is a, c, g, or t
  misc_feature (894)..(894): n is a, c, g, or t
  misc_feature (904)..(904): n is a, c, g, or t
  misc_feature (909)..(909): n is a, c, g, or t
  misc_feature (913)..(913): n is a, c, g, or t
  misc_feature (925)..(925): n is a, c, g, or t
  misc_feature (940)..(940): n is a, c, g, or t
  misc_feature (942)..(942): n is a, c, g, or t
  misc_feature (953)..(953): n is a, c, g, or t
  misc_feature (955)..(955): n is a, c, g, or t
  misc_feature (958)..(958): n is a, c, g, or t
  misc_feature (987)..(987): n is a, c, g, or t
  misc_feature (993)..(993): n is a, c, g, or t
  misc_feature (996)..(996): n is a, c, g, or t
  misc_feature (999)..(999): n is a, c, g, or t
  misc_feature (1006)..(1006): n is a, c, g, or t
  misc_feature (1014)..(1015): n is a, c, g, or t
  misc_feature (1022)..(1023): n is a, c, g, or t
  misc_feature (1033)..(1034): n is a, c, g, or t
  misc_feature (1036)..(1036): n is a, c, g, or t
  misc_feature (1050)..(1050): n is a, c, g, or t
  misc_feature (1052)..(1052): n is a, c, g, or t
  misc_feature (1058)..(1058): n is a, c, g, or t
  misc_feature (1062)..(1063): n is a, c, g, or t
  misc_feature (1073)..(1073): n is a, c, g, or t
  misc_feature (1078)..(1078): n is a, c, g, or t
  misc_feature (1080)..(1080): n is a, c, g, or t
gccgcgacccggactgcgcgccagcacccccctgccgacagctccgtcactatggaggatatgaacgagtacagcaatatagaggaattcgcagagggatccaagatcaacgcgagcaagaatcagcaggatgacggtaaaatgtttattggaggcttgagctgggatacaagcaaaaaagatctgacagagtacttgtctcgatttggggaagttgtagactgcacaattaaaacagatccagtcactgggagatcaagaggatttggatttgtgcttttcaaagatgctgctagtgttgataaggttttggaactgaaagaacacaaactggatggcaaattgatagatcccaaaagggccaaagctttaaaagggaaagaacctcccaaaaaggtttttgtgggtggattgagcccggatacttctgaagaacaaattaaagaatattttggagcctttggagagattgaaaatattgaacttcccatggatacaaaaacaaatgaaagaagaggattttgttttatcacatatactgatgaagagccagtaaaaaaattgttagaaagcagataccatcaaattggttctgggaagtgtgaaatcaaagttgcacaacccaaagaggtatataggcagcaaacagcaacaacaaaaaggtggaagaggtgctgcagctggtggacgaggtggtacgaggggtcgtggccgaagtcaggccaaaactggaaccaaggatttaataactattattgatcaaggatatggaaattacaatagtgcctaaggnggtgaatcaaaacctatagtgactatgggcggatatgattntactgggtanaactatggggaactanggannttgnacagggganatgccaaactaccntnggccaacaanaacantttntggccaggcatncccgaggggggggcnancccccaaaacnanttnccccccctatctaaagggaaaaccttggnaaaaanccnggngggaaangttaaagnnacccccnntttgcggaannantttgaaaattgggncntctgtngttnnaaaagatttnttttntnaaaaa

SEQ ID NO: 376 - DNA, 1046 bp, Homo sapiens
  misc_feature (710)..(710): n is a, c, g, or t
  misc_feature (776)..(776): n is a, c, g, or t
  misc_feature (778)..(778): n is a, c, g, or t
  misc_feature (790)..(790): n is a, c, g, or t
  misc_feature (803)..(803): n is a, c, g, or t
  misc_feature (807)..(807): n is a, c, g, or t
  misc_feature (832)..(832): n is a, c, g, or t
  misc_feature (834)..(834): n is a, c, g, or t
  misc_feature (843)..(843): n is a, c, g, or t
  misc_feature (856)..(856): n is a, c, g, or t
  misc_feature (861)..(861): n is a, c, g, or t
  misc_feature (865)..(865): n is a, c, g, or t
  misc_feature (877)..(877): n is a, c, g, or t
  misc_feature (904)..(904): n is a, c, g, or t
  misc_feature (911)..(911): n is a, c, g, or t
  misc_feature (923)..(923): n is a, c, g, or t
  misc_feature (925)..(925): n is a, c, g, or t
  misc_feature (929)..(929): n is a, c, g, or t
  misc_feature (932)..(932): n is a, c, g, or t
  misc_feature (935)..(935): n is a, c, g, or t
  misc_feature (939)..(939): n is a, c, g, or t
  misc_feature (951)..(951): n is a, c, g, or t
  misc_feature (962)..(962): n is a, c, g, or t
  misc_feature (974)..(974): n is a, c, g, or t
  misc_feature (984)..(985): n is a, c, g, or t
  misc_feature (988)..(988): n is a, c, g, or t
  misc_feature (1002)..(1002): n is a, c, g, or t
  misc_feature (1007)..(1008): n is a, c, g, or t
  misc_feature (1015)..(1018): n is a, c, g, or t
  misc_feature (1021)..(1021): n is a, c, g, or t
  misc_feature (1024)..(1024): n is a, c, g, or t
  misc_feature (1026)..(1026): n is a, c, g, or t
  misc_feature (1031)..(1031): n is a, c, g, or t
  misc_feature (1036)..(1036): n is a, c, g, or t
  misc_feature (1042)..(1042): n is a, c, g, or t
gctcctccagtgctgtgcgcatggcagtgggctgcctgctggagctggccttcaaggtggctgcaggagagctcaagaatggatttgccatcatccggcccccaggacaccacgccgaggaatccacagccatgggattctgcttcttcaactctgtagccatcaccgcaaaactcctacagcagaagttgaacgtgggcaaggtcctcatcgtggactgggacattcaccatggcaatggcacccagcaggcgttctacaatgacccctctgtgctctacatctctctgcatcgctatgacaacgggaacttctttccaggctctggggctcctgaagaggttggtggaggaccaggcgtggggtacaatgtgaacgtggcatggacaggaggtgtggacccccccattggagacgtggagtaccttacagccttcaggacagtggtgatgcccattgcccacgagttctcacctgatgtggtcctagtctccgccgggtttgatgctgttgaaggacatctgtctcctctgggtggctactctgtcaccgccagatgttttggccacttgaccaggcagctgatgaccctggcagggggccgggtggtgctggccctggagggaggccatgacttgaccgccatctgtgatgcctctgaggcttgtgtctcggctctgctcagtgtaaagctgcagcccttggatgangcagtcttgcagcaaaagcccaacatcaacgcagtggccacgctagaaaaagtcatcgagatccanancaaacactgganctgtgtgcaaaanttcnccgctggtctgggccggtccctgcnanaggcccaancaggtgaaaaccnaagangccnaaactgtgaacnccatggccttgctgtcggtgggggccnaacaagnccaagctgcggnancccnggnaanaaanccccaggccggnaaaagaacccntggaacaagaancctgccctgnnaanccccggcccccatnccctnnggggttnnnnatnggnantttgnttaantttttncaaa

SEQ ID NO: 377 - DNA, 1140 bp, Homo sapiens
  misc_feature (588)..(588): n is a, c, g, or t
  misc_feature (693)..(693): n is a, c, g, or t
  misc_feature (722)..(722): n is a, c, g, or t
  misc_feature (750)..(750): n is a, c, g, or t
  misc_feature (756)..(756): n is a, c, g, or t
  misc_feature (760)..(760): n is a, c, g, or t
  misc_feature (781)..(781): n is a, c, g, or t
  misc_feature (789)..(789): n is a, c, g, or t
  misc_feature (794)..(794): n is a, c, g, or t
  misc_feature (821)..(821): n is a, c, g, or t
  misc_feature (824)..(824): n is a, c, g, or t
  misc_feature (828)..(828): n is a, c, g, or t
  misc_feature (830)..(830): n is a, c, g, or t
  misc_feature (864)..(864): n is a, c, g, or t
  misc_feature (889)..(889): n is a, c, g, or t
  misc_feature (905)..(905): n is a, c, g, or t
  misc_feature (911)..(911): n is a, c, g, or t
  misc_feature (922)..(922): n is a, c, g, or t
  misc_feature (925)..(925): n is a, c, g, or t
  misc_feature (928)..(928): n is a, c, g, or t
  misc_feature (935)..(936): n is a, c, g, or t
  misc_feature (938)..(938): n is a, c, g, or t
  misc_feature (944)..(944): n is a, c, g, or t
  misc_feature (961)..(963): n is a, c, g, or t
  misc_feature (980)..(980): n is a, c, g, or t
  misc_feature (988)..(989): n is a, c, g, or t
  misc_feature (1002)..(1003): n is a, c, g, or t
  misc_feature (1007)..(1007): n is a, c, g, or t
  misc_feature (1021)..(1021): n is a, c, g, or t
  misc_feature (1030)..(1030): n is a, c, g, or t
  misc_feature (1040)..(1040): n is a, c, g, or t
  misc_feature (1042)..(1042): n is a, c, g, or t
  misc_feature (1045)..(1046): n is a, c, g, or t
  misc_feature (1049)..(1049): n is a, c, g, or t
  misc_feature (1065)..(1065): n is a, c, g, or t
  misc_feature (1067)..(1067): n is a, c, g, or t
  misc_feature (1069)..(1069): n is a, c, g, or t
  misc_feature (1083)..(1083): n is a, c, g, or t
  misc_feature (1110)..(1111): n is a, c, g, or t
  misc_feature (1115)..(1115): n is a, c, g, or t
  misc_feature (1133)..(1133): n is a, c, g, or t
  misc_feature (1137)..(1138): n is a, c, g, or t
ggctgtggaagccaggcgcacaggatgcaagcagccaggcccagggaggcagcagctgcatcctcagagaggaagccaggatgccccactctgctgggggtactgcaggggtggggctggaggctgcagagcccacagccctgctcaccagggcagagcccccttcagaacccacagagatccgtccacaaaagcggaaaaaggggccagcccccaaaatgctggggaacgagctatgcagcgtgtgtggggacaaggcctcgggcttccactacaatgttctgagctgcgagggctgcaagggattcttccgccgcagcgtcatcaagggagcgcactacatctgccacagtggcggccactgccccatggacacctacatgcgtcgcaagtgccaggagtgtcggcttcgcaaatgccgtcaggctggcatgcgggaggagtgtgtcctgtcagaagaacagatccgcctgaagaaactgaagcggcaagaggaggaacaggctcatgccacatccttgccccccagggcttcctcacccccccaaatcctgccccagctcagcccggaacaactgggcatgatcnagaagctcgtcgctgcccagcaacagtgtaaccggcgctccttttctgaccggcttcgagtcacgccttggcccatggcaccagatccccatagccgggaggccngtcagcagcgctttgcccacttcactganctggccatcgtctctgtgcaggaaatantttgantttnctaaaaagctacccggctttntgcaactnaaccnggaagaacaaaattgcccctgcttaanaantctncnattcaaggtggctggaaaaaggcaagggattaanggaaaaacaaaatgggaattttttntggggaggggccttcnaaaatncaagcttgggnaanccnaaatttnntnggaaancaaggaataaaaaaaannngccctcctttaaaaaangcattttnncaaaaaaaacccnnctanttccccttttaaanttttcctcnttttttccangnaannttntgaaaaatttccgaanananaaccttgggaatanaaattaccctttctaaggatttttttnnaccnggaaaaattttcaaaaangttnntt

SEQ ID NO: 378 - DNA, 246 bp, Homo sapiens
gaccgcggggaggctcacctcgagctgaacgccttccgcaggaagcatgattgtgccctggtcatctcgggagacttcctggaggtttgcctcaagtactatgagtacgagttcatggagctggcctgccagtgcccggccgtagtctgctgccgatgtgcccccacccagaaggcccagatcgtgcgcctgcttcaggagcgcacgggcaagctcacctgtgcactcagtaaaacgcagtgattc

SEQ ID NO: 379 - DNA, 1134 bp, Homo sapiens
  misc_feature (857)..(857): n is a, c, g, or t
  misc_feature (878)..(878): n is a, c, g, or t
  misc_feature (894)..(894): n is a, c, g, or t
  misc_feature (919)..(919): n is a, c, g, or t
  misc_feature (929)..(929): n is a, c, g, or t
  misc_feature (937)..(939): n is a, c, g, or t
  misc_feature (955)..(955): n is a, c, g, or t
  misc_feature (957)..(957): n is a, c, g, or t
  misc_feature (963)..(963): n is a, c, g, or t
  misc_feature (969)..(969): n is a, c, g, or t
  misc_feature (995)..(995): n is a, c, g, or t
  misc_feature (997)..(997): n is a, c, g, or t
  misc_feature (1001)..(1001): n is a, c, g, or t
  misc_feature (1006)..(1006): n is a, c, g, or t
  misc_feature (1027)..(1027): n is a, c, g, or t
  misc_feature (1030)..(1030): n is a, c, g, or t
  misc_feature (1042)..(1042): n is a, c, g, or t
  misc_feature (1046)..(1046): n is a, c, g, or t
  misc_feature (1063)..(1064): n is a, c, g, or t
  misc_feature (1067)..(1067): n is a, c, g, or t
  misc_feature (1069)..(1069): n is a, c, g, or t
  misc_feature (1073)..(1073): n is a, c, g, or t
  misc_feature (1075)..(1076): n is a, c, g, or t
  misc_feature (1080)..(1080): n is a, c, g, or t
  misc_feature (1106)..(1106): n is a, c, g, or t
  misc_feature (1116)..(1116): n is a, c, g, or t
  misc_feature (1120)..(1120): n is a, c, g, or t
  misc_feature (1127)..(1128): n is a, c, g, or t
  misc_feature (1130)..(1131): n is a, c, g, or t
gcccagccagcgcccgcgatgactgccactctccgcccctacctgagtgccgtgcgggccacattgcaggctgccctctgcctggagaacttctcctcccaggttgtggaacgacacaacaagccggaagtggaagtcaggagtagcaaagagctcctgttacaacctgtgaccatcagcaggaatgagaaggaaaaggttctgattgagggctccatcaactctgtccgggtcagcattgctgtgaaacaggctgatgagatcgagaagattttgtgccacaagttcatgcgcttcatgatgatgcgagcagagaacttctttatccttcgaaggaagcctgtggaggggtatgatatcagctttctgatcaccaacttccacacagagcagatgtacaaacacaagttggtggactttgtgatccacttcatggaggagattgacaaggagatcagtgagatgaagctgtcagtcaatgcccgtgcccgcattgtggctgaagagttccttaagaatttttaaaccatctggctggatctcgtggccttccccctcagactacccatgtctccacgaaggcgtcctggagtcactccccgagcagcgcggcggcggcagggagttgggttggggtgggcatttgatgcgggaggtgggtggtgtgcttgctagctgggcaagaaagcagcagtggacctgccccaaggccacacgtgcctggtcaggctggcttctgatgttcagtcccctgggccgggacagattttttttaacgtcttgaaacttaaactctgtgcttgtaggatactgtaacctttttgtcttttttttttttttttttttttaaacctccncctccagtggctgtgactggnccccagtgattaaacnttattggttgctgtgggtctgggcnggccctgganccaaaagnnnacttatttttttcccncnatgccncccccngggggggagggaggggaggtttcaancnccantttcncccttgccctttattcccaanccncttggccccaanaaantgtgggaacccttgccnnctncngaantnngccnaaaaaggcccccccccctggttgggnaaaggccaantggngaccccnntnngcc

SEQ ID NO: 380 - DNA, 1033 bp, Homo sapiens
  misc_feature (555)..(555): n is a, c, g, or t
  misc_feature (629)..(629): n is a, c, g, or t
  misc_feature (675)..(675): n is a, c, g, or t
  misc_feature (713)..(713): n is a, c, g, or t
  misc_feature (721)..(721): n is a, c, g, or t
  misc_feature (768)..(768): n is a, c, g, or t
  misc_feature (786)..(786): n is a, c, g, or t
  misc_feature (796)..(796): n is a, c, g, or t
  misc_feature (799)..(799): n is a, c, g, or t
  misc_feature (811)..(811): n is a, c, g, or t
  misc_feature (828)..(828): n is a, c, g, or t
  misc_feature (848)..(848): n is a, c, g, or t
  misc_feature (853)..(853): n is a, c, g, or t
  misc_feature (865)..(865): n is a, c, g, or t
  misc_feature (867)..(867): n is a, c, g, or t
  misc_feature (871)..(871): n is a, c, g, or t
  misc_feature (882)..(882): n is a, c, g, or t
  misc_feature (886)..(886): n is a, c, g, or t
  misc_feature (891)..(891): n is a, c, g, or t
  misc_feature (899)..(899): n is a, c, g, or t
  misc_feature (901)..(901): n is a, c, g, or t
  misc_feature (922)..(922): n is a, c, g, or t
  misc_feature (934)..(934): n is a, c, g, or t
  misc_feature (936)..(936): n is a, c, g, or t
  misc_feature (942)..(942): n is a, c, g, or t
  misc_feature (945)..(945): n is a, c, g, or t
  misc_feature (954)..(954): n is a, c, g, or t
  misc_feature (966)..(966): n is a, c, g, or t
  misc_feature (968)..(969): n is a, c, g, or t
  misc_feature (976)..(976): n is a, c, g, or t
  misc_feature (980)..(980): n is a, c, g, or t
  misc_feature (982)..(982): n is a, c, g, or t
  misc_feature (990)..(990): n is a, c, g, or t
  misc_feature (1000)..(1000): n is a, c, g, or t
  misc_feature (1002)..(1002): n is a, c, g, or t
  misc_feature (1007)..(1007): n is a, c, g, or t
  misc_feature (1017)..(1018): n is a, c, g, or t
  misc_feature (1021)..(1021): n is a, c, g, or t
  misc_feature (1025)..(1025): n is a, c, g, or t
  misc_feature (1028)..(1028): n is a, c, g, or t
  misc_feature (1030)..(1031): n is a, c, g, or t
gctcctggaggcggcgggatggaggcggcggccgagcctggaaacctggccggcgtcaggcacatcatcctggtcctctcaggaaaggggggcgttgggaaaagcaccatctccacggagctggccctggcactgcgccatgcaggcaagaaggtgggaatcctggatgtggacctgtgtggccccagtataccccgcatgctcggggcgcagggcagggctgtgcaccagtgcgaccgcggctgggcacccgtcttcctggaccgggagcagagcatctcgctcatgtctgtgggcttcctgctggagaagccggacgaggccgtggtgtggagaggccccaagaaaaacgcgctgataaagcagtttgtgtccgacgtggcctggggggagctggactacctggtggtggacacgcccccggggacctccgatgagcacatggccaccatagaagccctgcgtccctaccagcccctgggggccctcgtggtcaccacgccccaggcggtgtccgtgggggacgtgaggcgcgagctgaccttctgtaggaanacgggcttgcgggtgatgggaatcgtggagaatatgagcggcttcacctgcccacactgcacggagtgcaccancgtcttctccaggggcggcggagaggagctggcccagctcgccggngtgccctttcttaggctccgtgccccctggaccctgcnctcatgangaccctggaggagggccacgaactttcatccagaatttccccgggancccccgccttcgctgcantcacttccanaancccaaaaaaatnctggaacgcaacgcccncgtgccctcccctgaataangccancttttgcaaccncntttncaagggccacnaaangggcntttgctcnancctttcaaaaaaaaaaaaaangccctgggcttngnttcccnggncccttgaangggcaaagcccnanncaacctntaangnaaaaattntcccccaacnancccanccccaagaannttntccnaanannaa

SEQ ID NO: 381 - DNA, 1220 bp, Homo sapiens
  misc_feature (827)..(827): n is a, c, g, or t
  misc_feature (862)..(862): n is a, c, g, or t
  misc_feature (877)..(877): n is a, c, g, or t
  misc_feature (879)..(879): n is a, c, g, or t
  misc_feature (937)..(937): n is a, c, g, or t
  misc_feature (954)..(954): n is a, c, g, or t
  misc_feature (956)..(956): n is a, c, g, or t
  misc_feature (970)..(970): n is a, c, g, or t
  misc_feature (973)..(973): n is a, c, g, or t
  misc_feature (976)..(976): n is a, c, g, or t
  misc_feature (1000)..(1000): n is a, c, g, or t
  misc_feature (1006)..(1008): n is a, c, g, or t
  misc_feature (1013)..(1013): n is a, c, g, or t
  misc_feature (1024)..(1024): n is a, c, g, or t
  misc_feature (1028)..(1028): n is a, c, g, or t
  misc_feature (1032)..(1032): n is a, c, g, or t
  misc_feature (1035)..(1035): n is a, c, g, or t
  misc_feature (1045)..(1045): n is a, c, g, or t
  misc_feature (1060)..(1060): n is a, c, g, or t
  misc_feature (1064)..(1064): n is a, c, g, or t
  misc_feature (1074)..(1074): n is a, c, g, or t
  misc_feature (1081)..(1081): n is a, c, g, or t
  misc_feature (1092)..(1093): n is a, c, g, or t
  misc_feature (1098)..(1098): n is a, c, g, or t
  misc_feature (1124)..(1124): n is a, c, g, or t
  misc_feature (1142)..(1142): n is a, c, g, or t
  misc_feature (1151)..(1151): n is a, c, g, or t
  misc_feature (1158)..(1158): n is a, c, g, or t
  misc_feature (1166)..(1166): n is a, c, g, or t
  misc_feature (1171)..(1171): n is a, c, g, or t
  misc_feature (1175)..(1175): n is a, c, g, or t
  misc_feature (1177)..(1178): n is a, c, g, or t
  misc_feature (1181)..(1182): n is a, c, g, or t
  misc_feature (1184)..(1186): n is a, c, g, or t
  misc_feature (1188)..(1189): n is a, c, g, or t
  misc_feature (1192)..(1192): n is a, c, g, or t
  misc_feature (1195)..(1195): n is a, c, g, or t
  misc_feature (1211)..(1211): n is a, c, g, or t
  misc_feature (1213)..(1213): n is a, c, g, or t
gggagagattcctctgccatggagtcctacgatgtgatcgccaaccagcctgtcgtgatcgacaacggatccggtgtgattaaagctggttttgctggtgatcagatccccaaatactgctttccaaactatgtgggccgacccaagcacgttcgtgtcatggcaggagcccttgaaggcgacatcttcattggccccaaagctgaggagcaccgagggctgctttcaatccgctatcccatggagcatggcatcgtcaaggattggaacgacatggaacgcatttggcaatatgtctattctaaggaccagctgcagactttctcagaggagcatcctgtgctcctgactgaggcgcctttaaacccacgaaaaaaccgggaacgagctgccgaagttttcttcgagaccttcaatgtgcccgctcttttcatctccatgcaagctgtactcagcctttacgctacaggcaggaccacaggggtggtgctggattctggggatggagtcacccatgctgtgcccatctatgagggctttgccatgccccactccatcatgcgcatcgacatcgcgggccgggacgtctctcgcttcctgcgcctctacctgcgtaaggagggctacgacttccactcatcctctgagtttgagattgtcaaggccataaaagaaagagcctgttacctatccataaacccccaaaaaggatgagacgctagagacagagaaagctcagtactacctgcctgatggcagcaccattgagattggtccttcccgattccgggcccctgagttgctcttcaggccaaatttgattgganagaaaatgaaggcatccacgaggtcctggggttcnccattcaaaaatcananatggacctgcggcgcacgcttttctctaacattgtcctctcaggaggctctaccctgnttcaaaggttttggggnanaggctcctggagtnaantgnaaaaacctacctccaaaaaatggnaaaaannnggaantctgcccctcngganaaantgntattccccgnggaatgggggccccntccnttgccccccnggaaacntttaaaaaaannggggntcccaaaaagaaaattaaagaaaaanggggccccatcctcccanaaaaacttntaagggnggaaaatnccttncccncnnccnnannnannccnttnaaaccccttttttaancnaaatttt

SEQ ID NO: 382 - DNA, 1038 bp, Homo sapiens
  misc_feature (750)..(750): n is a, c, g, or t
  misc_feature (777)..(777): n is a, c, g, or t
  misc_feature (810)..(810): n is a, c, g, or t
  misc_feature (820)..(820): n is a, c, g, or t
  misc_feature (835)..(835): n is a, c, g, or t
  misc_feature (842)..(842): n is a, c, g, or t
  misc_feature (871)..(871): n is a, c, g, or t
  misc_feature (877)..(877): n is a, c, g, or t
  misc_feature (879)..(879): n is a, c, g, or t
  misc_feature (882)..(882): n is a, c, g, or t
  misc_feature (885)..(885): n is a, c, g, or t
  misc_feature (895)..(895): n is a, c, g, or t
  misc_feature (898)..(898): n is a, c, g, or t
  misc_feature (926)..(926): n is a, c, g, or t
  misc_feature (933)..(933): n is a, c, g, or t
  misc_feature (936)..(936): n is a, c, g, or t
  misc_feature (949)..(949): n is a, c, g, or t
  misc_feature (962)..(962): n is a, c, g, or t
  misc_feature (965)..(965): n is a, c, g, or t
  misc_feature (967)..(967): n is a, c, g, or t
  misc_feature (972)..(972): n is a, c, g, or t
  misc_feature (979)..(980): n is a, c, g, or t
  misc_feature (989)..(989): n is a, c, g, or t
  misc_feature (995)..(995): n is a, c, g, or t
  misc_feature (1000)..(1000): n is a, c, g, or t
  misc_feature (1005)..(1005): n is a, c, g, or t
  misc_feature (1010)..(1011): n is a, c, g, or t
  misc_feature (1017)..(1017): n is a, c, g, or t
  misc_feature (1021)..(1021): n is a, c, g, or t
  misc_feature (1024)..(1024): n is a, c, g, or t
  misc_feature (1030)..(1030): n is a, c, g, or t
gaggacattcccctgaacctcagccgggagctgctgcaggagagcgcactcatcaggaaactccgggacgttttacagcagaggctgatcaaattcttcattgaccagagtaaaaaagatgctgagaagtatgcaaagttttttgaagattacggcctgttcatgcgggagggcattgtgaccgccaccgagcaggaggtcaaggaggacatagcaaagctgctgcgctacgagtcctcggcgctgccctccgggcagctaaccagcctctcagaatacgccagccgcatgcgggccggcacccgcaacatctactacctgtgcgcccccaaccgtcacctggcagagcactcaccctactatgaggccatgaagaagaaagacacagaggttctcttctgctttgagcagtttgatgagctcaccctgctgcaccttcgtgagtttgacaagaagaagctgatctctgtggagacggacatagtcgtggatcactacaaggaggagaagtttgaggacaggtccccagccgccgagtgcctatcagagaaggagacggaggagctcatggcctggatgagaaatgtgctggggtcgcgtgtcaccaacgtgaaggtgaccctccgactggacacccaccctgccatggtcaccgtgctggagatgggggctgcccgccacttcctgcgcatgcagcagctggccaagacccaggaggagcgcgcacagctcctgcagcccacgctgganatcaaccccaggcacgcgctcatcaanaagctgaatcagctgcgcgcaagcgagcctggncctggctcanctgctggtggatcanatatacnaaaacgccatgaattgctgctggacttgnttgacnanccntanggccatggtnggnccgcttgaatgaacttgcttgtcaaggnccctggnaancgaacctgaaaanccaggggggccanaangnactgnacccccnnaaatgaaancccccncctcnttganctttnnttaccntaanttnaaaggnattttctt

SEQ ID NO: 383 - DNA, 786 bp, Homo sapiens
  misc_feature (285)..(285): n is a, c, g, or t
  misc_feature (597)..(597): n is a, c, g, or t
  misc_feature (613)..(613): n is a, c, g, or t
  misc_feature (635)..(635): n is a, c, g, or t
  misc_feature (640)..(640): n is a, c, g, or t
  misc_feature (659)..(659): n is a, c, g, or t
  misc_feature (668)..(668): n is a, c, g, or t
  misc_feature (679)..(679): n is a, c, g, or t
  misc_feature (709)..(709): n is a, c, g, or t
  misc_feature (740)..(740): n is a, c, g, or t
  misc_feature (743)..(743): n is a, c, g, or t
  misc_feature (746)..(746): n is a, c, g, or t
  misc_feature (749)..(749): n is a, c, g, or t
  misc_feature (756)..(756): n is a, c, g, or t
  misc_feature (761)..(761): n is a, c, g, or t
  misc_feature (764)..(764): n is a, c, g, or t
  misc_feature (767)..(767): n is a, c, g, or t
  misc_feature (773)..(773): n is a, c, g, or t
  misc_feature (776)..(776): n is a, c, g, or t
  misc_feature (781)..(781): n is a, c, g, or t
  misc_feature (783)..(783): n is a, c, g, or t
gagacgcccagctccaagaaaagcgccctcatcaagttagccaacatccgggcagcggaaaaggttgaggaaaagagctttggcggctcgcacgtcatgcaggtcatctacacggacgacgccggcaggccccagactgcctacctgcagtgcaagtgtgtgaatgagcttaaccagtggctgtctgcgctgcggaaggtgagcatcaacaacaccggactgctgggctcctaccaccctggcgtcttccgtggggacaagtggagctgctgccaccaaaaaganaagacaggtcagggctgcgataagacccggtcacgggtgaccctgcaggagtggaatgaccctcttgaccatgaccttgaggcccagctcatctaccggcacctgctgggcgtggaggccatgctgtgggagaggcaccgggagctgagcgggggcgcagaggcaggcacggtgcccacgagccctggcaaagtccccgaggactcattggcccggctgctccgggtgctgcaggacctccgcgaggcccatagctccagcccggccggctccccaccctcagagcccaactgcctcctggagctgcagacntgaggcccgccctacnctccccttgctgagtcccctgnccaancgctcggagcccccccagnacactctgnaccccctcacnccggtcctccttcattaaggtgcagggccnaggtctcttccagtggggggaggggggagantcnctnaanaaggggnatccncanaanttgcanaanctgancnaag

SEQ ID NO: 384 - DNA, 1098 bp, Homo sapiens
  misc_feature (843)..(843): n is a, c, g, or t
  misc_feature (888)..(888): n is a, c, g, or t
  misc_feature (919)..(919): n is a, c, g, or t
  misc_feature (940)..(940): n is a, c, g, or t
  misc_feature (952)..(952): n is a, c, g, or t
  misc_feature (959)..(959): n is a, c, g, or t
  misc_feature (973)..(973): n is a, c, g, or t
  misc_feature (975)..(976): n is a, c, g, or t
  misc_feature (986)..(986): n is a, c, g, or t
  misc_feature (1002)..(1002): n is a, c, g, or t
  misc_feature (1008)..(1008): n is a, c, g, or t
  misc_feature (1013)..(1013): n is a, c, g, or t
  misc_feature (1028)..(1028): n is a, c, g, or t
  misc_feature (1030)..(1030): n is a, c, g, or t
  misc_feature (1032)..(1032): n is a, c, g, or t
  misc_feature (1048)..(1048): n is a, c, g, or t
  misc_feature (1062)..(1062): n is a, c, g, or t
  misc_feature (1069)..(1071): n is a, c, g, or t
  misc_feature (1077)..(1078): n is a, c, g, or t
  misc_feature (1084)..(1084): n is a, c, g, or t
  misc_feature (1089)..(1089): n is a, c, g, or t
  misc_feature (1092)..(1092): n is a, c, g, or t
  misc_feature (1097)..(1097): n is a, c, g, or t
gggaagagattcccaactgataaagcgtacttcatagctaaggaagtgtctaccaccgagcgaacatatctgaaggatctcgaagttatcacttcgtggtttcagagcacagtgagcaaagaggacgccatgccggaagcactgaaaagtctcatattcccgaattttgaacctttgcacaaatttcatactaattttctcaaggaaattgagcaacgacttgccctgtgggaaggccgctcaaatgcccaaatcagagattaccaaagaatcggcgatgtcatgctgaagaacattcagggcatgaagcacctggcggctcacctgtggaagcacagcgaggccttggaggccctggagaatggaatcaagagctcccggcggctggagaacttctgcagagactttgagctgcagaaggtgtgttacctaccgctcaacaccttcctcctgcggccactgcaccggctcatgcactacaagcaggtcctggagcggctgtgcaaacaccacccgccgagccacgccgacttcagggactgccgagccgctttggcagagatcacggagatggtggcacagctccacggtacgatgatcaagatggagaatttccagaagctgcacgaactcaagaaagatttgattggcattgacaatcttgtggttccgggaagggagttcatccgtctgggcagcctcagcaagctctcggggaaggggctccagcagcgcatgttcttcctgttcaacgacgtcctgctatacacgagccgggggctgacggcctccaatcagtttaaagtccacgggcagctcccgctctatggcatgacgattgangagagcgaaaacaagtgggggggggccccactgcctgaccctccnggggccagcgggcagtccatcatcggggccncccagttctcggtcccaaaanggaaaaatgggnttgaagnacatcccaaatggncnnttgacctggncggaaaaaaacaacancccccnccccnggatttcctggccancnancccccctgaaaaaaantcccctgaagaaanccccccnnnctgacnnaaatcnaaagntgncctgna

SEQ ID NO: 385 - DNA, 1201 bp, Homo sapiens
  misc_feature (791)..(791): n is a, c, g, or t
  misc_feature (883)..(883): n is a, c, g, or t
  misc_feature (885)..(885): n is a, c, g, or t
  misc_feature (897)..(897): n is a, c, g, or t
  misc_feature (899)..(899): n is a, c, g, or t
  misc_feature (902)..(902): n is a, c, g, or t
  misc_feature (929)..(930): n is a, c, g, or t
  misc_feature (945)..(945): n is a, c, g, or t
  misc_feature (961)..(962): n is a, c, g, or t
  misc_feature (966)..(966): n is a, c, g, or t
  misc_feature (978)..(979): n is a, c, g, or t
  misc_feature (984)..(984): n is a, c, g, or t
  misc_feature (986)..(986): n is a, c, g, or t
  misc_feature (996)..(996): n is a, c, g, or t
  misc_feature (1001)..(1001): n is a, c, g, or t
  misc_feature (1014)..(1014): n is a, c, g, or t
  misc_feature (1019)..(1019): n is a, c, g, or t
  misc_feature (1032)..(1032): n is a, c, g, or t
  misc_feature (1037)..(1037): n is a, c, g, or t
  misc_feature (1050)..(1050): n is a, c, g, or t
  misc_feature (1056)..(1056): n is a, c, g, or t
  misc_feature (1060)..(1060): n is a, c, g, or t
  misc_feature (1063)..(1063): n is a, c, g, or t
  misc_feature (1090)..(1090): n is a, c, g, or t
  misc_feature (1098)..(1099): n is a, c, g, or t
  misc_feature (1102)..(1102): n is a, c, g, or t
  misc_feature (1106)..(1107): n is a, c, g, or t
  misc_feature (1121)..(1121): n is a, c, g, or t
  misc_feature (1134)..(1134): n is a, c, g, or t
  misc_feature (1146)..(1146): n is a, c, g, or t
  misc_feature (1159)..(1159): n is a, c, g, or t
  misc_feature (1173)..(1173): n is a, c, g, or t
  misc_feature (1175)..(1175): n is a, c, g, or t
  misc_feature (1179)..(1179): n is a, c, g, or t
  misc_feature (1182)..(1182): n is a, c, g, or t
  misc_feature (1188)..(1188): n is a, c, g, or t
  misc_feature (1190)..(1190): n is a, c, g, or t
gcccacgcgtccgcgactgaggaagcacagcctagcactagcacaagtacacaggccccagccgcttcccctactggtgtagttcctggtaccaaatatgcagtacctgacacgtccacttaccagtatgatgaatcttcaggatattactatgatccgacaacagggctctattatgaccccaactcgcaatactactataattccttgacccagcagtacctttactgggatggggaaaaagagacctacgtgccagctgcagagtctagctcccaccagcagtcgggcctgcctcctgcaaaagaggggaaagagaagaaggagaaacccaagagcaaaacagcccagcagattgccaaagacatggaacgctgggctaagagtttgaataagcagaaagaaaactttaaaaatagctttcagcctgtcaattccttgagggaagaagaaaggagagaatctgctgcagcagacgctggctttgctctctttgagaagaagggagccttagctgaaaggcagcagctcatcccagaattggtgcgaaatggagatgaggagaatcccctcaaaaggggtctggttgctgcttacagtggtgacagtgacaatgaggaggagctggtggagagacttgagagtgaggaagagaagctagctgactggaagaagatggcctgtctgctctgccggcgccagttcccgaacaaagatgccctagtcaggcaccagcaactctcagaccttcacaagcaaaacatggacatctaccgacgatccaggctgancgagcaggagctggaagccttggagctaagggaaagagagatgaaatacccgagaccgaactgcaaaaagacgggaaaatacggcattccanancctccaaagccnangcncaaaaaaccagtttgatgcccgccctnnggaattacgagcaancccccccaaagatggnnttgnaccccagtaacnnttggnancaaaatgctnccagnccatggggcctgncgggnaaaggctttgggnttggnaacaaaaggggcnaaggcntttncgnctcccattggaggcccaagttcggctnaagggaannggncctnngaacccaaaggccnccctttggttttnggcgggccccanttcctaaaaaaanttttccgaaaaccngntttnccnggttcntnaaatggggggg

SEQ ID NO: 386 - DNA, 1109 bp, Homo sapiens
  misc_feature (849)..(849): n is a, c, g, or t
  misc_feature (886)..(886): n is a, c, g, or t
  misc_feature (888)..(888): n is a, c, g, or t
  misc_feature (904)..(904): n is a, c, g, or t
  misc_feature (924)..(924): n is a, c, g, or t
  misc_feature (931)..(931): n is a, c, g, or t
  misc_feature (949)..(949): n is a, c, g, or t
  misc_feature (956)..(957): n is a, c, g, or t
  misc_feature (962)..(962): n is a, c, g, or t
  misc_feature (964)..(964): n is a, c, g, or t
  misc_feature (973)..(973): n is a, c, g, or t
  misc_feature (976)..(976): n is a, c, g, or t
  misc_feature (990)..(990): n is a, c, g, or t
  misc_feature (999)..(999): n is a, c, g, or t
  misc_feature (1001)..(1001): n is a, c, g, or t
  misc_feature (1008)..(1008): n is a, c, g, or t
  misc_feature (1018)..(1018): n is a, c, g, or t
  misc_feature (1028)..(1028): n is a, c, g, or t
  misc_feature (1036)..(1036): n is a, c, g, or t
  misc_feature (1049)..(1049): n is a, c, g, or t
  misc_feature (1066)..(1066): n is a, c, g, or t
  misc_feature (1073)..(1073): n is a, c, g, or t
  misc_feature (1086)..(1089): n is a, c, g, or t
  misc_feature (1093)..(1094): n is a, c, g, or t
  misc_feature (1104)..(1105): n is a, c, g, or t
gcgacgttccgttcccccctgcccgccttctcccgccaccgccgccgccgccttccgcaggccgtttccaccgaggaaaaggaatcgtatcgtatgtccgctatccagaacctccactctttcgacccctttgctgatgcaagtaagggtgatgacctgcttcctgctggcactgaggattatatccatataagaattcaacagagaaacggcaggaagacccttactactgtccaagggatcgctgatgattacgataaaaagaaactagtgaaggcgtttaagaaaaagtttgcctgcaatggtactgtaattgagcatccggaatatggagaagtaattcagctacagggtgaccaacgcaagaacatatgccagttcctcgtagagattggactggctaaggacgatcagctgaaggttcatgggttttaagtgcttgtggctcactgaagcttaagtgaggatttccttgcaatgagtagaatttcccttctctcccttgtcacaggtttaaaaacctcacagcttgtataatgtaaccatttggggtccgcttttaacttggactagtgtaactccttcatgcaataaactgaaaagagccatgctgtctagtcttgaagtccctcatttaaacagaggtcaagcaataggcgcctggcagtgtcaagcctgaaaccaagcaataccgtcatgtttcagccaagcccagagccctaagattacaaacaactatggccggaacctcctcagctctccctctgcaaagttccctaccctaagagaatgttaccacctgaacagtcctcggtgaatctgaaaggaaaggatggggtaaggcaaaancaccagctgtactactaaaagggagctttttgggggnanatcccctggggtctcnacctgactagggggacaaanctcaaanaggccctcttaccgctancgaaggnnaaagnanatctggctngcncaaaggtctgttcnaccaaaatntnctaactnaaggatgtcnaacatcaaangggagccnaccttcttcaaanttaattttgaaaggaanaaatccnaactgatcctccnnnngtannagctggaaannttgc

SEQ ID NO: 387 - DNA, 921 bp, Homo sapiens
  misc_feature (594)..(594): n is a, c, g, or t
  misc_feature (632)..(632): n is a, c, g, or t
  misc_feature (645)..(645): n is a, c, g, or t
  misc_feature (653)..(653): n is a, c, g, or t
  misc_feature (740)..(740): n is a, c, g, or t
  misc_feature (747)..(747): n is a, c, g, or t
  misc_feature (749)..(749): n is a, c, g, or t
  misc_feature (752)..(752): n is a, c, g, or t
  misc_feature (758)..(758): n is a, c, g, or t
  misc_feature (762)..(762): n is a, c, g, or t
  misc_feature (764)..(764): n is a, c, g, or t
  misc_feature (775)..(776): n is a, c, g, or t
  misc_feature (790)..(790): n is a, c, g, or t
  misc_feature (812)..(812): n is a, c, g, or t
  misc_feature (824)..(825): n is a, c, g, or t
  misc_feature (837)..(837): n is a, c, g, or t
  misc_feature (849)..(849): n is a, c, g, or t
  misc_feature (855)..(856): n is a, c, g, or t
  misc_feature (863)..(863): n is a, c, g, or t
  misc_feature (873)..(874): n is a, c, g, or t
  misc_feature (880)..(880): n is a, c, g, or t
  misc_feature (883)..(883): n is a, c, g, or t
  misc_feature (887)..(887): n is a, c, g, or t
  misc_feature (889)..(889): n is a, c, g, or t
  misc_feature (897)..(897): n is a, c, g, or t
  misc_feature (902)..(903): n is a, c, g, or t
  misc_feature (915)..(915): n is a, c, g, or t
gcatccaccagcagccgccggagcgccgcgtggtcaccgttgtctttctcggcctcctgctggacctcctggccttcacgctgctgctgcccctgctgcccgggctgttggagagccacggccgtgcccacgaccccctctatggctcctggcagggcggggtggactggtttgccaccgccatcgggatgccagtggagaagaggtacaacagtgtcctgttcggaggtctcattggctcggcattctctgtcctgcagtttctgtgtgcgccactcactggggccacctctgactgcttggggaggcgcccggtgatgctgctgtgcctgatgggtgtggccacctcatatgcagtctgggccacctctcggagctttgcggccttcctggcctccaggctgattgggggcatcagcaaagggaacgtcagcctctccacggccatcgttgctgacctgggctcgcctctggcccgcagtcaaggcatggcggtcattggggtggccttctcactgggcttcaccctgggccctatgctcggagcctccctgcccctggaaatggcaccctggtttgccctgctcttcgcancctccgacctgctgttcatcttctgcttcctgccaganacgctgcccctgnagaaacgngcgccctctatcgccctggggttccgtgatgcagctgatctgctcagcccccctggccctgctgcactttctcggctgtcacttcgnggccagnanccnaccctnttgnanacaggctcaannaacctgcgcccacntgggcctaaatcaaatttctcnaacctttttccnngttctcgggccngaaaaaacaccnttaaannttccttnaaacaccaanngctttncanattnantaatcctnacaannaggaaaaaaaanattttt

SEQ ID NO: 388 - DNA, 1005 bp, Homo sapiens
  misc_feature (683)..(683): n is a, c, g, or t
  misc_feature (718)..(718): n is a, c, g, or t
  misc_feature (736)..(736): n is a, c, g, or t
  misc_feature (761)..(761): n is a, c, g, or t
  misc_feature (764)..(764): n is a, c, g, or t
  misc_feature (771)..(771): n is a, c, g, or t
  misc_feature (783)..(783): n is a, c, g, or t
  misc_feature (814)..(815): n is a, c, g, or t
  misc_feature (824)..(824): n is a, c, g, or t
  misc_feature (828)..(828): n is a, c, g, or t
  misc_feature (834)..(834): n is a, c, g, or t
  misc_feature (847)..(847): n is a, c, g, or t
  misc_feature (851)..(851): n is a, c, g, or t
  misc_feature (866)..(866): n is a, c, g, or t
  misc_feature (885)..(885): n is a, c, g, or t
  misc_feature (887)..(888): n is a, c, g, or t
  misc_feature (905)..(905): n is a, c, g, or t
  misc_feature (911)..(911): n is a, c, g, or t
  misc_feature (914)..(914): n is a, c, g, or t
  misc_feature (919)..(919): n is a, c, g, or t
  misc_feature (927)..(927): n is a, c, g, or t
  misc_feature (941)..(941): n is a, c, g, or t
  misc_feature (944)..(945): n is a, c, g, or t
  misc_feature (947)..(962): n is a, c, g, or t
  misc_feature (964)..(965): n is a, c, g, or t
  misc_feature (973)..(973): n is a, c, g, or t
  misc_feature (978)..(978): n is a, c, g, or t
  misc_feature (982)..(982): n is a, c, g, or t
  misc_feature (987)..(987): n is a, c, g, or t
  misc_feature (990)..(990): n is a, c, g, or t
  misc_feature (998)..(998): n is a, c, g, or t
  misc_feature (1002)..(1002): n is a, c, g, or t
gcaggggcgtgcagcccgcttgccaatcagagcgcggctgagcggccccgcagccaacccccgaggagcggccggctggcgtccgccgcgcccaggagttggggatgtcctacaaacccatcgcccctgctcccagcagcacccctggctccagcacccctgggccgggcaccccggtccctacaggaagcgtcccgtcgccgtcgggctcagtgccaggagccggcgctcctttcagaccgctgtttaacgactttggaccgccttccatgggctacgtgcaggcgatgaagccacccggcgcccagggctcccagagcacctacacggacctgctgtcagtcatagaggagatgggcaaagagatccggcctacctatgctggcagcaagagcgccatggagcgcctgaagagaggtatcatccatgcccgggccctagtcagagagtgcctggcagagacagagcggaacgcccgcacgtaacaggaagcgcctcggcctcagcgtctggacctatccggccactgcagagcacccgcttctccctggccttcatcccgagttgcactaaccatcctgggcttcctgtcctgtgtcccttggtgggtcccctccaggaaccaaggagtggccctccaggtggcagcactaaggacacccccccacaacaagagttagcancgaggtccccatgagtcccacccatgacctgcccnacagtgttgcccaccggnaacttttgtggcccctaccgctcanccnttcccancacttctcccanttttgtcccgaagcctccttcttcccccaannaaggggcanaggncttggnaacctccctggcnttgngtcctgaaacaaaangaactcttttatctggggngnnttttgcaaaaaatgccntttttntanttaanaaaaaaanattttgaaaaaaanaannannnnnnnnnnnnnnnngnngggccccnccctnaaanggaantcnaattaaancttnatt

SEQ ID NO: 389 - DNA, 1087 bp, Homo sapiens
  misc_feature (634)..(634): n is a, c, g, or t
  misc_feature (690)..(690): n is a, c, g, or t
  misc_feature (738)..(738): n is a, c, g, or t
  misc_feature (769)..(769): n is a, c, g, or t
  misc_feature (808)..(808): n is a, c, g, or t
  misc_feature (816)..(816): n is a, c, g, or t
  misc_feature (828)..(828): n is a, c, g, or t
  misc_feature (840)..(840): n is a, c, g, or t
  misc_feature (864)..(864): n is a, c, g, or t
  misc_feature (876)..(876): n is a, c, g, or t
  misc_feature (878)..(878): n is a, c, g, or t
  misc_feature (886)..(886): n is a, c, g, or t
  misc_feature (907)..(907): n is a, c, g, or t
  misc_feature (924)..(924): n is a, c, g, or t
  misc_feature (942)..(942): n is a, c, g, or t
  misc_feature (983)..(983): n is a, c, g, or t
  misc_feature (988)..(988): n is a, c, g, or t
  misc_feature (990)..(990): n is a, c, g, or t
  misc_feature (1011)..(1011): n is a, c, g, or t
  misc_feature (1013)..(1013): n is a, c, g, or t
  misc_feature (1033)..(1033): n is a, c, g, or t
  misc_feature (1038)..(1038): n is a, c, g, or t
  misc_feature (1044)..(1044): n is a, c, g, or t
  misc_feature (1047)..(1047): n is a, c, g, or t
  misc_feature (1058)..(1058): n is a, c, g, or t
  misc_feature (1073)..(1073): n is a, c, g, or t
  misc_feature (1077)..(1077): n is a, c, g, or t
  misc_feature (1081)..(1081): n is a, c, g, or t
gagcggatcgcgggctcgggctgcggggctccggctgcgggcgctgggccgcgaggcgcggagcttgggagcggagcccaggccgtgccgcgcggcgccatgaagggcaaggaggagaaggagggcggcgcacggctgggcgctggcggcggaagccccgagaagagcccgagcgcgcaggagctcaaggagcagggcaatcgtctgttcgtgggccgaaagtacccggaggcggcggcctgctacggccgcgcgatcacccggaacccgctggtggccgtgtattacaccaaccgggccttgtgctacctgaagatgcagcagcacgagcaggccctggccgactgccggcgcgccctggagctggacgggcagtctgtgaaggcgcacttcttcctggggcagtgccagctggagatggagagctatgatgaggccatcgccaatctgcagcgagcttacagcctggccaaggagcagcggctgaacttcggggacgacatccccagcgctcttcgaatcgcgaagaagaagcgctggaacagcattgaggagcggcgcatccaccaggagagcgagctgcactcctacctctccaggctcattgccgcggagcgtgagagggagctggaanagtgccagcgaaaccacgagggtgatgaggacgacagccacgtccgggcccagcangcctgcattgaggccaagcacgacaagtacatggcggacatggacganctttttttctcaggtggatgaaaaaaggaanaagcgagacatcccccgactacctgtgtggcaagatcancttttganctgatgcggganccgtgcatcacncccaagtggcatcacctacaaccncaaggaaattcnangaaacacntgcagcgtgtgggttattttnacccccttaaccggaanccccttaaccaagaaaanctcatccccactttggttttaaagaagttattgacccattnttttntnaaaatggctgggtggaaaaananttaagtttccctgccctaantgggnccttgntcnagggaaccctngggaaaaacccccgncccntaanaaattt

SEQ ID NO: 390 - DNA, 919 bp, Homo sapiens
  misc_feature (753)..(753): n is a, c, g, or t
  misc_feature (811)..(811): n is a, c, g, or t
  misc_feature (870)..(870): n is a, c, g, or t
  misc_feature (878)..(878): n is a, c, g, or t
  misc_feature (889)..(913): n is a, c, g, or t
gcggacgcgtgggtgggcatggatgtgctgaacgaggccattggtaccctcaccgccaggggggaccggaatgcctgggtccccaccatgctcagtgtgtctgactctctcatgactgcacaccccattcaggcagaggccagtacagaggaggagccattgtggcagtgccctgtgcgccttgtgacatttattggtgttggccgcgacccacacacctttggcctcatcgctgacctgggccgtcagagcttccagtgcgcagccttctggtgccagccccatgcagggggactctctgaagctgtgcaggctgcctgtatggttcagtaccagaagtgtcttgtggcctctgcagctcgaggcaaggcctggggtgcccaggcccgtgcccgcctgcggctcaagcggaccagctccatggattccccaggaggtcccctgcccctccccctgctcaaaggaggggttggcggtgcaggggcaacccctcgaaagcggggtgtcttctcttttcttgatgccttccggctgaaaccctctctgctccatatgccctaaacttatctgggaaggctggggaagtaggctctgggtccatgcctaactctgtaccgttttattcctcaaggcctatagcctgtcactccttgaagccttctctgcctgtccctccgatccttgtccaccgtctatttattgcccaatttattgtttatacggatgactgggaggcactgcaccacaacgtangaccctggctcccctttccttgggtccttgtgttccttgcccctgtccaaccctgganagttggctctacctcagtaacactttatagcaaaatcagtgcaaataaaaatccctcantgacctcnaaaaaaaaaannnnnnnnnnnnnnnnnnnnnnnnngggcgg

SEQ ID NO: 391 - DNA, 1071 bp, Homo sapiens
  misc_feature (671)..(671): n is a, c, g, or t
  misc_feature (705)..(705): n is a, c, g, or t
  misc_feature (708)..(708): n is a, c, g, or t
  misc_feature (717)..(717): n is a, c, g, or t
  misc_feature (837)..(837): n is a, c, g, or t
  misc_feature (842)..(842): n is a, c, g, or t
  misc_feature (844)..(844): n is a, c, g, or t
  misc_feature (860)..(860): n is a, c, g, or t
  misc_feature (862)..(862): n is a, c, g, or t
  misc_feature (870)..(870): n is a, c, g, or t
  misc_feature (882)..(882): n is a, c, g, or t
  misc_feature (887)..(887): n is a, c, g, or t
  misc_feature (894)..(894): n is a, c, g, or t
  misc_feature (900)..(900): n is a, c, g, or t
  misc_feature (906)..(906): n is a, c, g, or t
  misc_feature (924)..(924): n is a, c, g, or t
  misc_feature (932)..(932): n is a, c, g, or t
  misc_feature (936)..(936): n is a, c, g, or t
  misc_feature (941)..(941): n is a, c, g, or t
  misc_feature (944)..(944): n is a, c, g, or t
  misc_feature (951)..(952): n is a, c, g, or t
  misc_feature (967)..(967): n is a, c, g, or t
  misc_feature (972)..(972): n is a, c, g, or t
  misc_feature (974)..(974): n is a, c, g, or t
  misc_feature (986)..(987): n is a, c, g, or t
  misc_feature (997)..(997): n is a, c, g, or t
  misc_feature (1014)..(1016): n is a, c, g, or t
  misc_feature (1024)..(1024): n is a, c, g, or t
  misc_feature (1030)..(1031): n is a, c, g, or t
  misc_feature (1033)..(1033): n is a, c, g, or t
  misc_feature (1039)..(1040): n is a, c, g, or t
  misc_feature (1042)..(1042): n is a, c, g, or t
  misc_feature (1050)..(1050): n is a, c, g, or t
  misc_feature (1054)..(1054): n is a, c, g, or t
  misc_feature (1066)..(1067): n is a, c, g, or t
gggcccggccaggcccccggcacttcctcgtcctcggcccgggtgccctgcccccgtccaggagccctaggagtgctacggggggccggagccttgcccgggccgctgccccgtccctggattcggggctggacgcagcaagcggggcgctgtgtccccaagctccccgtcctcggccaggcgggcaccacggcaggggctgagctaccctcatggaagggagaggaccgtaccggatctacgaccctgggggcagcgtgccctcaggagaggcatccgcagcttttgagcgcctagtgaaggagaattcccggctgaaggaaaaaatgcaagggataaagatgttaggggagcttttggaagagtcccagatggaagcgaccaggctccggcagaaggcagaggagctagtgaaggacaacgagctgctcccaccaccttctccctccttgggctccttcgaccccctggctgagctcacaggaaaggactcaaatgtcacagcatctcccacagcccctgcatgccccagtgacaagccagcaccagtccagaagcctccatccagtggcacctcctctgaatttgaagtggtcactcctgaggagcagaattcaccaaagagcagcagccatgccaatgcgatggcgctgggccccctgccccgtgangacggcaacctgatgctgcacctgcagcgcctgnaanaccacgctnaattgtgtgtgccgaagaaacccggaccacggccagctcttcacccacctggggccgcatggcccctgaagttcaaccgactgggaatccaaggtgcacaaaaaatgaacagcgcacctncattntncaaaacctgtgttgancnactttcgnaaggaaaacaangcttnttaaagnccaaantttgantaagggccttggaaaaanacgggatnaagnttgcnaanaggtttnnggaaaagaaaatttnggatntnaaaaattttttnnataaacaatnggaaacaaaaaagggtnnnttttgggnggccanngnttcccnnanaatggaangggnaaaggcaaaaannattt

SEQ ID NO: 392 - DNA, 1061 bp, Homo sapiens
  misc_feature (805)..(805): n is a, c, g, or t
  misc_feature (823)..(823): n is a, c, g, or t
  misc_feature (842)..(842): n is a, c, g, or t
  misc_feature (893)..(893): n is a, c, g, or t
  misc_feature (910)..(910): n is a, c, g, or t
  misc_feature (914)..(914): n is a, c, g, or t
  misc_feature (916)..(916): n is a, c, g, or t
  misc_feature (920)..(920): n is a, c, g, or t
  misc_feature (923)..(923): n is a, c, g, or t
  misc_feature (930)..(930): n is a, c, g, or t
  misc_feature (955)..(957): n is a, c, g, or t
  misc_feature (961)..(961): n is a, c, g, or t
  misc_feature (966)..(966): n is a, c, g, or t
  misc_feature (968)..(968): n is a, c, g, or t
  misc_feature (977)..(977): n is a, c, g, or t
  misc_feature (982)..(982): n is a, c, g, or t
  misc_feature (988)..(989): n is a, c, g, or t
  misc_feature (994)..(994): n is a, c, g, or t
  misc_feature (1001)..(1001): n is a, c, g, or t
  misc_feature (1006)..(1006): n is a, c, g, or t
  misc_feature (1018)..(1018): n is a, c, g, or t
  misc_feature (1027)..(1027): n is a, c, g, or t
  misc_feature (1047)..(1047): n is a, c, g, or t
  misc_feature (1060)..(1060): n is a, c, g, or t
ggggagctctactgcctggaacacggcatccagcccgatggccagatgccaagtgacaagaccattgggggaggagatgactccttcaacaccttcttcagtgagacgggcgctggcaagcacgtgccccgggctgtgtttgtagacttggaacccacagtcattgatgaagttcgcactggcacctaccgccagctcttccaccctgagcagctcatcacaggcaaggaagatgctgccaataactatgcccgagggcactacaccattggcaaggagatcattgaccttgtgttggaccgaattcgcaagctggctgaccagtgcaccggtcttcagggcttcttggttttccacagctttggtgggggaactggttctgggttcacctccctgctcatggaacgtctctcagttgattatggcaagaagtccaagctggagttctccatttacccagcaccccaggtttccacagctgtagttgagccctacaactccatcctcaccacccacaccaccctggagcactctgattgtgccttcatggtagacaatgaggccatctatgacatctgtcgtagaaacctcgatatcgagcgcccaacctacactaaccttaaccgccttattagccagattgtgtcctccatcactgcttccctgagatttgatggagccctgaatgttgacctgacagaattccagaccaacctggtgccctacccccgcatccacttccctctggccacatatgcccctgtcatctctgctgagaaagcctaccatgaacagctttctgtancagagatcaccaatgctngctttgagccagccaaacnaaatggtgaaatgtgaccctcgccatggtaaaaacatggcttgctgcctgnttgtaccgtggtgactngttncnaaanatntcaatgnctgccattgccaccatcaaaaccannnccancatcnantttggggantgggngccccnntgggnttcaagntgggnatcaactaccancccccccantggggggcctgggggaaacntggccaaaggaana

SEQ ID NO: 393 - DNA, 1008 bp, Homo sapiens
  misc_feature (696)..(696): n is a, c, g, or t
  misc_feature (824)..(824): n is a, c, g, or t
  misc_feature (828)..(828): n is a, c, g, or t
  misc_feature (836)..(836): n is a, c, g, or t
  misc_feature (849)..(849): n is a, c, g, or t
  misc_feature (870)..(870): n is a, c, g, or t
  misc_feature (877)..(877): n is a, c, g, or t
  misc_feature (911)..(911): n is a, c, g, or t
  misc_feature (922)..(922): n is a, c, g, or t
  misc_feature (934)..(935): n is a, c, g, or t
  misc_feature (940)..(940): n is a, c, g, or t
  misc_feature (945)..(945): n is a, c, g, or t
  misc_feature (947)..(948): n is a, c, g, or t
  misc_feature (960)..(960): n is a, c, g, or t
  misc_feature (969)..(969): n is a, c, g, or t
  misc_feature (978)..(979): n is a, c, g, or t
  misc_feature (986)..(986): n is a, c, g, or t
  misc_feature (991)..(991): n is a, c, g, or t
  misc_feature (994)..(995): n is a, c, g, or t
  misc_feature (1002)..(1002): n is a, c, g, or t
  misc_feature (1004)..(1004): n is a, c, g, or t
  misc_feature (1008)..(1008): n is a, c, g, or t
gcccacgcgtccgaacgaggcctcttctcacaagtacgtgcctcgagccattctggtggacctggacatctcttcaggcctgacaatttcatctttggtcagagtggggccggcaacaactgggccaagggtcactacacggagggggcggagctggtggattcggtcctggatgtggtgcggaaggagtgtgaaaactgcgactgcctgcagggcttccagctgacccactcgctggggggcggcacgggctccggcatgggcacgttgctcatcagcaaggtgcgtgaggagtatcccgaccgcatcatgaacaccttcagcgtcgtgccctcacccaaggtgtcagacacggtggtggagccctacaacgccacgctgtccatccaccagctggtggagaacacggatgagacctactgcatcgacaacgaggcgctctacgacatctgcttccgcaccctcaagctggccacgcccacctacggggacctcaaccacctggtatcggccaccatgagcggagtcaccacctccttgcgcttcccgggccagctcaacgctgacctgcgcaagctggccgtcaacatggtgcccttcccgcgcctgcacttcttcatgcccggcttcgcccccctcacagcccggggcagccagcagtaccgggccctgaccgtgcccgagctcacccagcanatgttcgatgccaagaacatgatggccgcctgcgacccgcgccacggccgctacctgacggtggccaccgtgttccggggccgcatgtccatgaaggaggtggacgaacaaatgctggccatccaaancaanaacagcanctacttcgtggantggatccccaacaacgtgaangtggccntgtgtgaaaatcccgccccgcggccctcaaaagncctccaccttnatcgggaaaaannacggncatcnannaactgttcaagngcatctccnaaaaatttnnggccatnttccnggnncaaggcntncctn

SEQ ID NO: 394 - DNA, 983 bp, Homo sapiens
  misc_feature (788)..(788): n is a, c, g, or t
  misc_feature (829)..(829): n is a, c, g, or t
  misc_feature (850)..(850): n is a, c, g, or t
  misc_feature (860)..(860): n is a, c, g, or t
  misc_feature (891)..(891): n is a, c, g, or t
  misc_feature (904)..(904): n is a, c, g, or t
  misc_feature (909)..(909): n is a, c, g, or t
  misc_feature (923)..(923): n is a, c, g, or t
  misc_feature (927)..(927): n is a, c, g, or t
  misc_feature (931)..(931): n is a, c, g, or t
  misc_feature (935)..(935): n is a, c, g, or t
  misc_feature (938)..(938): n is a, c, g, or t
  misc_feature (945)..(945): n is a, c, g, or t
  misc_feature (952)..(953): n is a, c, g, or t
  misc_feature (955)..(955): n is a, c, g, or t
  misc_feature (963)..(963): n is a, c, g, or t
  misc_feature (966)..(966): n is a, c, g, or t
  misc_feature (970)..(970): n is a, c, g, or t
  misc_feature (978)..(978): n is a, c, g, or t
  misc_feature (981)..(981): n is a, c, g, or t
gcgggggcgcagggaccgtgctccgccgtctccgccgcatcttccaccctcgccgccgccgcagctccccgcgctcgtgccaccgccgccgcgtccaccctcagcgccaccgccatgcgggagatcgtgcacctgcaggccggccagtgcggcaaccagatcggggccaagttttgggaggttatcagtgacgaacatggcatcgaccccacaggcacataccatggggacagtgacctgcaactggagaggatcaacgtgtactacaacgaggccacaggaggaaattatgtccccagagcggtgctggtggacctggaacccggcaccatggactctgtccgttctggccccttcggtcagatctttcggccggacaacttcgtgtttggccaatccggagccggcaacaactgggcaaaggggcactacacggagggcgcagagctggtggacgctgtcctggacgtagtccggaaggaggccgagagctgcgactgccttcagggcttccagctgacccactcgctggggggtggcacggggtccggaatgggcacgctgctcatcagtaagatccgcgaggagttcccagaccgcatcatgaacaccttcagcgtggtgccctcgcccaaagtgtcagacacggtggtggagccctacaacgccacgctgtctgtgcaccagctggtggagaatacggatgagacctactgcatcgacaacgaggcactctacgacatctgtttccgcaccctcaagctgaccacccccacctacggggaacntcaaccacctggtgtcggccaccatgagcggggtcaccacntgcctgcgcttcccgggccanctgaacgccnactgcgcaagctggccgtcaaaatggtcccnttttctcgcctgnacttnttcatgccgggttnccancccntganaanccggggnaaccaannantaccgggnccntganggtgcccnaantc

SEQ ID NO: 395 - DNA, 1206 bp, Homo sapiens
  misc_feature (643)..(643): n is a, c, g, or t
  misc_feature (701)..(701): n is a, c, g, or t
  misc_feature (764)..(764): n is a, c, g, or t
  misc_feature (817)..(817): n is a, c, g, or t
  misc_feature (820)..(820): n is a, c, g, or t
  misc_feature (832)..(832): n is a, c, g, or t
  misc_feature (838)..(838): n is a, c, g, or t
  misc_feature (850)..(850): n is a, c, g, or t
  misc_feature (853)..(853): n is a, c, g, or t
  misc_feature (883)..(884): n is a, c, g, or t
  misc_feature (892)..(892): n is a, c, g, or t
  misc_feature (905)..(905): n is a, c, g, or t
  misc_feature (907)..(907): n is a, c, g, or t
  misc_feature (918)..(919): n is a, c, g, or t
  misc_feature (936)..(936): n is a, c, g, or t
  misc_feature (941)..(941): n is a, c, g, or t
  misc_feature (951)..(951): n is a, c, g, or t
  misc_feature (953)..(953): n is a, c, g, or t
  misc_feature (984)..(984): n is a, c, g, or t
  misc_feature (986)..(986): n is a, c, g, or t
  misc_feature (994)..(994): n is a, c, g, or t
  misc_feature (999)..(999): n is a, c, g, or t
  misc_feature (1007)..(1007): n is a, c, g, or t
  misc_feature (1015)..(1015): n is a, c, g, or t
  misc_feature (1047)..(1047): n is a, c, g, or t
  misc_feature (1052)..(1053): n is a, c, g, or t
  misc_feature (1063)..(1063): n is a, c, g, or t
  misc_feature (1072)..(1072): n is a, c, g, or t
  misc_feature (1075)..(1075): n is a, c, g, or t
  misc_feature (1077)..(1077): n is a, c, g, or t
  misc_feature (1087)..(1087): n is a, c, g, or t
  misc_feature (1101)..(1101): n is a, c, g, or t
  misc_feature (1103)..(1104): n is a, c, g, or t
  misc_feature (1108)..(1108): n is a, c, g, or t
  misc_feature (1110)..(1110): n is a, c, g, or t
  misc_feature (1117)..(1117): n is a, c, g, or t
  misc_feature (1143)..(1144): n is a, c, g, or t
  misc_feature (1149)..(1150): n is a, c, g, or t
  misc_feature (1158)..(1158): n is a, c, g, or t
  misc_feature (1162)..(1162): n is a, c, g, or t
  misc_feature (1171)..(1171): n is a, c, g, or t
  misc_feature (1176)..(1176): n is a, c, g, or t
  misc_feature (1182)..(1182): n is a, c, g, or t
  misc_feature (1189)..(1189): n is a, c, g, or t
  misc_feature (1192)..(1192): n is a, c, g, or t
  misc_feature (1203)..(1203): n is a, c, g, or t
ggcccgctcttctgctgctgtttgtctacttcctcctgcttccccgccgccgccgccgccatcatgagggaaatcgtgcacttgcaggccgggcagtgcggcaaccaaatcggcgccaagttttgggaggtgatcagcgatgagcacggcatcgaccccacgggcacctaccacggggacagcgacctgcagctggaacgcatcaacgtgtactacaatgaggccaccggcggcaagtacgtgccccgcgccgtgctcgtggatctggagcccggcaccatggactccgtgcgctcggggcccttcgggcagatcttccggccggacaacttcgttttcggtcagagtggtgctgggaacaactgggccaaggggcactacacagaaggcgcggagctggtggactcggtgctggatgttgtgagaaaggaggctgagagctgtgactgcctgcagggtttccagctgacccactccctgggtggggggactgggtctgggatgggtaccctcctcatcagcaagatccgggaggagtacccagacaggatcatgaacacgtttagtgtggtgccttcgcccaaagtgtcagacacagtggtggagccctacaacgccaccctctcagtccaccagctcgtanaaaacacagacgagacctactgcattgataacgaagctctctacgacatttgcttcanaaccctaaagctgaccacgcccacctatggtgacctgaaccacctggtgtctgctaccatgantggggtcaccacctgcctgcgctttccaaggccagctcaatgctgacctgcgnaanctggctgtgaanatggtncccgtttccccnggntgcacttcttcatgcccggctttgccccanntgaacaanccggggcaaccancnataaccggggnnctgaaccgtgcccgaanctcancccagcaaangntttgatgccaaaaaaatgaagggctgccttncnacccccgncaatnggcccctnacctgaangtttgccccccttgtttcaggggccccccatntccannaaaggaaggngaaaaaaanaantnctttaattgnccaaaaaaaaaaanannccancnttttttntttgaaagggaatcccccaaaaaggnnaaaanngggttttnttgnaaaaccccnccccngggggnaaaaaanttnccccccccctnttt

SEQ ID NO: 396 - DNA, 1032 bp, Homo sapiens
  misc_feature (762)..(762): n is a, c, g, or t
  misc_feature (771)..(771): n is a, c, g, or t
  misc_feature (812)..(812): n is a, c, g, or t
  misc_feature (873)..(873): n is a, c, g, or t
  misc_feature (881)..(881): n is a, c, g, or t
  misc_feature (885)..(885): n is a, c, g, or t
  misc_feature (887)..(887): n is a, c, g, or t
  misc_feature (902)..(902): n is a, c, g, or t
  misc_feature (904)..(904): n is a, c, g, or t
  misc_feature (922)..(922): n is a, c, g, or t
  misc_feature (928)..(928): n is a, c, g, or t
  misc_feature (933)..(933): n is a, c, g, or t
  misc_feature (939)..(939): n is a, c, g, or t
  misc_feature (942)..(942): n is a, c, g, or t
  misc_feature (945)..(946): n is a, c, g, or t
  misc_feature (948)..(948): n is a, c, g, or t
  misc_feature (957)..(957): n is a, c, g, or t
  misc_feature (972)..(972): n is a, c, g, or t
  misc_feature (978)..(980): n is a, c, g, or t
  misc_feature (983)..(983): n is a, c, g, or t
  misc_feature (991)..(991): n is a, c, g, or t
  misc_feature (999)..(999): n is a, c, g, or t
  misc_feature (1007)..(1008): n is a, c, g, or t
  misc_feature (1027)..(1028): n is a, c, g, or t
gcccacgcgtccgcccacgcgtccgaagaaatgcagagtaacgtggaagtggtccacacctaccgccagcacattgtgaatgacatgaaccccggcaacctgcacctgttcatcaatgcctacaacagccggcgcgacctggagattgagcgaccaatgccgggaacccacacagtcaccctgcagtgccctgctctgttggtggttggggacagctcgcctgcagtggatgccgtggtggagtgcaactcaaaattggacccaacaaagaccactctcctcaagatggcggactgtggcggcctcccgcagatctcccagccggccaagctcgctgaggccttcaagtacttcgtgcagggcatgggatacatgccctcggctagcatgacccgcctgatgcggtcccgcacagcctctggttccagcgtcacttctctggatggcacccgcagccgctcccacaccagcgagggcacccgaagccgctcccacaccagcgagggcacccgcagccgctcgcacaccagcgagggggcccacctggacatcacccccaactcgggtgctgctgggaacagcgccgggcccaagtccatggaggtctcctgctaggcggcctgcccagctgccgcccccggactctgatctctgtagtggccccctcctccccggccccttttcgccccctgcctgccatactgcgcctaactcggtattaatccaaaagcttatttttgtaagagtgagctctggtggaanacaaatganggtctattacgtgggtgcccctctccaaaggcgggggtggnggtggaccaaaaggaaggaaagcaaagcatctccgcatcgcatcctcttccattaaccagngggcgggntgcnantttcctccccttccntnaaaaaaaccaaactgccnaaaaanaaaangcgtancancannantttcaaaanccaaacctaggcccnccctgnnnatnctggtttnaaacgggngccttggnncaaaaggccaacccccccnntttc

SEQ ID NO: 397 - DNA, 1084 bp, Homo sapiens
  misc_feature (763)..(763): n is a, c, g, or t
  misc_feature (815)..(815): n is a, c, g, or t
  misc_feature (848)..(848): n is a, c, g, or t
  misc_feature (864)..(864): n is a, c, g, or t
  misc_feature (879)..(879): n is a, c, g, or t
  misc_feature (886)..(886): n is a, c, g, or t
  misc_feature (907)..(907): n is a, c, g, or t
  misc_feature (934)..(934): n is a, c, g, or t
  misc_feature (936)..(936): n is a, c, g, or t
  misc_feature (946)..(947): n is a, c, g, or t
  misc_feature (962)..(962): n is a, c, g, or t
  misc_feature (966)..(966): n is a, c, g, or t
  misc_feature (969)..(969): n is a, c, g, or t
  misc_feature (973)..(973): n is a, c, g, or t
  misc_feature (977)..(977): n is a, c, g, or t
  misc_feature (981)..(981): n is a, c, g, or t
  misc_feature (984)..(984): n is a, c, g, or t
  misc_feature (989)..(989): n is a, c, g, or t
  misc_feature (1010)..(1010): n is a, c, g, or t
  misc_feature (1012)..(1012): n is a, c, g, or t
  misc_feature (1021)..(1021): n is a, c, g, or t
  misc_feature (1023)..(1023): n is a, c, g, or t
  misc_feature (1030)..(1030): n is a, c, g, or t
  misc_feature (1043)..(1043): n is a, c, g, or t
  misc_feature (1051)..(1051): n is a, c, g, or t
  misc_feature (1054)..(1055): n is a, c, g, or t
  misc_feature (1059)..(1059): n is a, c, g, or t
  misc_feature (1064)..(1065): n is a, c, g, or t
  misc_feature (1068)..(1068): n is a, c, g, or t
  misc_feature (1083)..(1083): n is a, c, g, or t
gcccacgcgtccgggagaggttgtggtgctagtttctctaagccatccagtgccatcctcgtcgctgcagcgacacacgctctcgccgccgccatgactgagcagatgacccttcgtggcaccctcaagggccacaacggctgggtaacccagatcgctactaccccgcagttcccggacatgatcctctccgcctctcgagataagaccatcatcatgtggaaactgaccagggatgagaccaactatggaattccacagcgtgctctgcggggtcactcccactttgttagtgatgtggttatctcctcagatggccagtttgccctctcaggctcctgggatggaaccctgcgcctctgggatctcacaacgggcaccaccacgaggcgatttgtgggccataccaaggatgtgctgagtgtggccttctcctctgacaaccggcagattgtctctggatctcgagataaaaccatcaagctatggaataccctgggtgtgtgcaaatacactgtccaggatgagagccactcagagtgggtgtcttgtgtccgcttctcgcccaacagcagcaaccctatcatcgtctcctgtggctgggacaagctggtcaaggtatggaacctggctaactgcaagctgaagaccaaccacattggccacacaggctatctgaacacggtgactgtctctccagatggatccctctgtgcttctggaggcaaggatggccaggccatgttatgggatctcaacgaangcaaacacctttacacgctagatggtggggacatcatcaacgccctgtgctncagccctaaccgctactggctgggtgctgccanaggccccagcatcaanatctgggaattaaangggaaanatcttgtaaagaactgaaacnaaaaattttcagtaccagcagcaaggnanaaccccccanngcacctccctggccnggtntgntganggcnaaanttnttttntggttacacggaaaacctggngngagtggggnangggaacnttggcacaccctnaaaatttnggnnaaanttttnnaanaaaaaaaaaatgggna

SEQ ID NO: 398 - DNA, 1045 bp, Homo sapiens
  misc_feature (775)..(775): n is a, c, g, or t
  misc_feature (832)..(832): n is a, c, g, or t
  misc_feature (862)..(862): n is a, c, g, or t
  misc_feature (868)..(868): n is a, c, g, or t
  misc_feature (876)..(876): n is a, c, g, or t
  misc_feature (878)..(878): n is a, c, g, or t
  misc_feature (883)..(883): n is a, c, g, or t
  misc_feature (904)..(904): n is a, c, g, or t
  misc_feature (907)..(907): n is a, c, g, or t
  misc_feature (917)..(917): n is a, c, g, or t
  misc_feature (931)..(931): n is a, c, g, or t
  misc_feature (940)..(940): n is a, c, g, or t
  misc_feature (945)..(945): n is a, c, g, or t
  misc_feature (948)..(948): n is a, c, g, or t
  misc_feature (961)..(961): n is a, c, g, or t
  misc_feature (969)..(969): n is a, c, g, or t
  misc_feature (971)..(972): n is a, c, g, or t
  misc_feature (990)..(990): n is a, c, g, or t
  misc_feature (995)..(995): n is a, c, g, or t
  misc_feature (1000)..(1000): n is a, c, g, or t
  misc_feature (1002)..(1002): n is a, c, g, or t
  misc_feature (1006)..(1006): n is a, c, g, or t
  misc_feature (1008)..(1008): n is a, c, g, or t
  misc_feature (1010)..(1010): n is a, c, g, or t
  misc_feature (1017)..(1017): n is a, c, g, or t
  misc_feature (1027)..(1027): n is a, c, g, or t
  misc_feature (1032)..(1032): n is a, c, g, or t
  misc_feature (1039)..(1040): n is a, c, g, or t
  misc_feature (1042)..(1045): n is a, c, g, or t
ggccggtcgttcggacgtcttgcctgtcgctggaggagaggtccgggctctccaggaaggtggctgcggcgacaaaatgaagatattcgtgggcaacgtcgacggggcggatacgactccggaggagctggcagccctctttgcgccctacggcacggtcatgagctgcgccgtcatgaaacagttcgccttcgtgcacatgcgcgagaacgcgggcgcgctgcgcgccatcgaagccctgcacggccacgagctgcggccggggcgcgcgctcgtggtggagatgtcgcgcccaaggcctcttaatacttggaagattttcgtgggcaatgtgtcggctgcatgcacgagccaggaactgcgcagcctcttcgagcgccgcggacgcgtcatcgagtgtgacgtggtgaaagactacgcgtttgttcacatggagaaggaagcagatgccaaagccgcaatcgcgcagctcaacggcaaagaagtgaagggcaagcgcatcaacgtggaactctccaccaagggtcagaagaaggggcctggcctggctgtccagtctggggacaagaccaagaaaccaggggctggggatacggccttccctggaactggtggcttctctgccaccttcgactaccagcaggcttttggcaacagcactggtggctttgatgggcaagcccgtcagcccacaccacccttctttggtcgcgaccgcagccctctgcgccgttcacctccccgagcctcttatgtggctcctctgacggcccanccagctacctaccgggcccagccgtccgtgtcactgggagctgcctacagggcccanccttctgcctctttgggtgttggctatcgnactcancccatganancccangcagcctcttaccgcgctcanccntctgtctccnttggggcaccatanaggggccanctggntantcctaactcccantctgctgnanntttttactcggcccatanggggnaaccnancctnancntcggccnttttctctanggggntaagganntnnnn

SEQ ID NO: 399 - DNA, 1069 bp, Homo sapiens
  misc_feature (829)..(829): n is a, c, g, or t
  misc_feature (831)..(831): n is a, c, g, or t
  misc_feature (853)..(853): n is a, c, g, or t
  misc_feature (877)..(877): n is a, c, g, or t
  misc_feature (901)..(901): n is a, c, g, or t
  misc_feature (905)..(905): n is a, c, g, or t
  misc_feature (909)..(909): n is a, c, g, or t
  misc_feature (955)..(955): n is a, c, g, or t
  misc_feature (964)..(964): n is a, c, g, or t
  misc_feature (968)..(968): n is a, c, g, or t
  misc_feature (973)..(973): n is a, c, g, or t
  misc_feature (975)..(976): n is a, c, g, or t
  misc_feature (997)..(997): n is a, c, g, or t
  misc_feature (1003)..(1003): n is a, c, g, or t
  misc_feature (1012)..(1012): n is a, c, g, or t
  misc_feature (1032)..(1032): n is a, c, g, or t
  misc_feature (1039)..(1039): n is a, c, g, or t
  misc_feature (1050)..(1050): n is a, c, g, or t
  misc_feature (1056)..(1069): n is a, c, g, or t
gcctcctccccgggagagagcgaggcgcgcgggtccctctgcgccacccccgcccccgccccttccgagcaaacttttggcacccaccgcagcccagcgcgcgttcgtgctccgcagggcgcgcctctctccgccaatgccaggcgcgcgggggagccattaggaggcgaggagagaggagggcgcagctcccgcccagcccagccctgcccagccctgcccggaggcagacgcgccggaaccgggacgcgataaatatgcagagcggaggcttcgcgcagcagagcccgcgcgccgcccgctccgggtgctgaatccaggcgtggggacacgagccaggcgccgccgccggagccagcggagccggggccagagccggagcgcgtccgcgtccacgcagccgccggccggccagcacccagggccctgcatgccaggtcgttggaggtggcagcgagacatgcacccggcccggaagctcctcagcctcctcttcctcatcctgatgggcactgaactcactcaagtgctgcccaccaaccctgaggagagctggcaggtgtacagctctgcccaggacagcgagggcaggtgtatctgcacagtggtcgccccacagcagaccatgtgttcacgggatgcccgcacaaaacagctgaggcagctactggagaaggtgcagaacatgtctcaatccatagaggtcttggacaggcggacccagagagacttgcagtacgtggagaagatggagaaccaaatgaaaggactggagtccaagttcaaacaggtggaggagagtcataagcaacacctggccaggcagttnanggctaacttaaaaaattttttnaatgctgcagtgactgaaaaacantccactcccatgtaaccatgaaanaaanccanaaagctttttgcaccatgcatttttactattattttcaatacttancaccttttnctangaacntnnataaaccaggattcttctttnatgcantgtactgcntttatgaaaatttgaacctnttaatgntttttttaaanaaaaannnnnnnnnnnnnn

SEQ ID NO: 400 - DNA, 1037 bp, Homo sapiens
  misc_feature (639)..(639): n is a, c, g, or t
  misc_feature (779)..(779): n is a, c, g, or t
  misc_feature (785)..(785): n is a, c, g, or t
  misc_feature (805)..(805): n is a, c, g, or t
  misc_feature (814)..(814): n is a, c, g, or t
  misc_feature (868)..(869): n is a, c, g, or t
  misc_feature (877)..(877): n is a, c, g, or t
  misc_feature (886)..(886): n is a, c, g, or t
  misc_feature (909)..(910): n is a, c, g, or t
  misc_feature (947)..(947): n is a, c, g, or t
  misc_feature (950)..(950): n is a, c, g, or t
  misc_feature (955)..(955): n is a, c, g, or t
  misc_feature (959)..(959): n is a, c, g, or t
  misc_feature (967)..(967): n is a, c, g, or t
  misc_feature (971)..(971): n is a, c, g, or t
  misc_feature (976)..(976): n is a, c, g, or t
  misc_feature (991)..(992): n is a, c, g, or t
  misc_feature (994)..(994): n is a, c, g, or t
  misc_feature (997)..(999): n is a, c, g, or t
  misc_feature (1002)..(1002): n is a, c, g, or t
  misc_feature (1004)..(1004): n is a, c, g, or t
  misc_feature (1010)..(1010): n is a, c, g, or t
  misc_feature (1021)..(1021): n is a, c, g, or t
  misc_feature (1032)..(1033): n is a, c, g, or t
  misc_feature (1037)..(1037): n is a, c, g, or t
gtcttgctagattctcaggggctgctagattcatccctgatggcatcaggcactgccagccgctcagaggatgaggagtcactggcagggcagaagcgagcctcctcccaggccttgggcaccatccctaaacggagaagctcctccaggttcatcaagaggaagaagttcgatgatgagctggtggagagcagcctggcaaaatcttctacccgggcaaagggggccagtggggtggaaccagggcgctgttcggggagtgaaccctcctccagtgagaagaagaaggtatccaaagcccccagcactcctgtgccacccagcccagccccagcccctggactcaccaagcgtgtgaagaagagtaaacagccacttcaggtgaccaaggatctgggccgctggaagcctgcagatgacctcctgctcataaatgctgtgttgcagaccaacgacctgacctccgtccacctgggcgtgaaattcagctgccgcttcacccttcgggaggtccaggagcgttggtacgccctgctctacgatcctgtcatctccaagttggcctgtcaggccatgaggcagctgcacccagaggctattgcagccatccagagcaaggccctgtttagcaaggctgangagcagctgctgagcaaagtgggatcgaccagccagcccaccttggagaccttccaggacctgctgcacagacaccctgatgccttctacctggcccgtaccgcgaaggccctgcaggcccactggcactcatgaagcantattanctgctggaggaccaaacagncgctgcccnaaaggggaccaagtgctgaactttctttgatgcaaaggacctgattgaatgacnntaacctcnaggaaatgncaaatgaagtcctggaaaatganntgatgggggctgaccgccccaaaaaccaaaaattcgncancttgnaaangaaatgcnaaantgggnaggggctatgggaanncnttnnnggnanaatttnccggaaatttnaaaaccaaaanntggn

SEQ ID NO: 401 - DNA, 785 bp, Homo sapiens
gggcggcggcagcgggttcggttgcgcgtggcgcacggggtgggagcggagcccaggccgggagcaggcgccgccgccacaggcgaccatggggaacgtgttggctgccagctcgccgcccgcagggccgccaccgccgcctgcgccggccctcgtggggctgccgccacctccgccctcgccgccgggcttcacgctgccgccgctgggaggcagcctgggcgccggcaccagtacgagtcgaagttcggaacggacccccggggctgcaaccgccagcgcctcaggggccgccgaggatggggcctgcggctgcctgcccaacccgggcacattcgaggagtgccaccggaagtgcaaggagctgtttcccattcagatggagggtgtcaagctcacagtcaacaaagggttgagtaaccattttcaggtcaaccacacagtagccctcagcacaatcggggagtccaactaccacttcggggtcacatatgtggggacaaagcagctgagtcccacagaggcgttccctgtactggtgggtgacatggacaacagtggcagtctcaacgctcaggtcattcaccagctgggccccggtctcaggtccaagatggccatccagacccagcagtcgaagtttgtgaactggcaggtggacggggagtatcggggctctgacttcacagcagccgtcaccctggggaacccagacgtcctcgtgggttcaggaatcctcgtagcccactacctccagagcatcacgccttgcctggccctgggtg

SEQ ID NO: 402 - DNA, 1136 bp, Homo sapiens
  misc_feature (759)..(759): n is a, c, g, or t
  misc_feature (795)..(795): n is a, c, g, or t
  misc_feature (810)..(810): n is a, c, g, or t
  misc_feature (822)..(822): n is a, c, g, or t
  misc_feature (863)..(863): n is a, c, g, or t
  misc_feature (873)..(873): n is a, c, g, or t
  misc_feature (911)..(912): n is a, c, g, or t
  misc_feature (940)..(940): n is a, c, g, or t
  misc_feature (946)..(946): n is a, c, g, or t
  misc_feature (959)..(959): n is a, c, g, or t
  misc_feature (961)..(961): n is a, c, g, or t
  misc_feature (980)..(980): n is a, c, g, or t
  misc_feature (993)..(993): n is a, c, g, or t
  misc_feature (1006)..(1006): n is a, c, g, or t
  misc_feature (1010)..(1011): n is a, c, g, or t
  misc_feature (1017)..(1017): n is a, c, g, or t
  misc_feature (1019)..(1019): n is a, c, g, or t
  misc_feature (1024)..(1024): n is a, c, g, or t
  misc_feature (1030)..(1030): n is a, c, g, or t
  misc_feature (1038)..(1038): n is a, c, g, or t
  misc_feature (1040)..(1040): n is a, c, g, or t
  misc_feature (1044)..(1044): n is a, c, g, or t
  misc_feature (1056)..(1056): n is a, c, g, or t
  misc_feature (1064)..(1065): n is a, c, g, or t
  misc_feature (1068)..(1068): n is a, c, g, or t
  misc_feature (1070)..(1070): n is a, c, g, or t
  misc_feature (1078)..(1078): n is a, c, g, or t
  misc_feature (1080)..(1080): n is a, c, g, or t
  misc_feature (1082)..(1082): n is a, c, g, or t
  misc_feature (1091)..(1091): n is a, c, g, or t
  misc_feature (1094)..(1094): n is a, c, g, or t
  misc_feature (1098)..(1098): n is a, c, g, or t
ggtccgctttcgtctccgtcctgctgccgttaccgccgctgctgccgccgcttgcgtcccccgctccggtctgtggtgcagccgggacccaggaccatgtctctgtctcgctcagaggagatgcaccggctcacggaaaatgtctataagaccatcatggagcagttcaaccctagcctccggaacttcatcgccatggggaagaattacgagaaggcactggcaggtgtgacgtatgcagccaaaggctactttgacgccctggtgaagatgggggagctggccagcgagagccagggctccaaagaactcggagacgttctcttccagatggctgaagtccacaggcagatccagaatcagctggaagaaatgctgaagtcttttcacaacgagctgcttacgcagctggagcagaaggtggagctggactccaggtatctgagtgctgcgctgaagaaataccagactgagcaaaggagcaaaggcgacgccctggacaagtgtcaggctgagctgaagaagcttcggaagaagagccagggcagcaagaatcctcagaagtactcggacaaggagctgcagtacatcgacgccatcagcaacaagcagggcgagctggagaattacgtgtccgacggctacaagaccgcactgacagaggagcgcaggcgcttctgcttcctggtggagaagcagtgcgccgtggccaagaactccgcggcctaccactccaagggcaaggagctgctggcgcanaagctgccgctgtggcaacaggcctgtgccgacccnagcaagatcccggancgcgcggtgcanctcatgcagcaggtggccagcaacggcgccacccttccccnagcgccctgntcggcccccaagtccaacctgggtcatttccgaccccnnttccggggggccaagcccctgccggggncccccnaagctggcaccgntncgtggggggggatttctgncccagaaaaaccnacccatcatgaancggnntccaangncccgnatgggnagaaaaanancccntggggctgaccncaagggtnnccnanccaaaatncntntttcccccngantttnaaaaaaagtttagggaatcttatttcaaaaaaattccc

SEQ ID NO: 403 - DNA, 1009 bp, Homo sapiens
  misc_feature (743)..(743): n is a, c, g, or t
  misc_feature (813)..(813): n is a, c, g, or t
  misc_feature (825)..(825): n is a, c, g, or t
  misc_feature (861)..(861): n is a, c, g, or t
  misc_feature (878)..(878): n is a, c, g, or t
  misc_feature (883)..(883): n is a, c, g, or t
  misc_feature (896)..(896): n is a, c, g, or t
  misc_feature (907)..(907): n is a, c, g, or t
  misc_feature (912)..(912): n is a, c, g, or t
  misc_feature (925)..(925): n is a, c, g, or t
  misc_feature (928)..(928): n is a, c, g, or t
  misc_feature (945)..(945): n is a, c, g, or t
  misc_feature (949)..(949): n is a, c, g, or t
  misc_feature (954)..(955): n is a, c, g, or t
  misc_feature (963)..(963): n is a, c, g, or t
  misc_feature (965)..(965): n is a, c, g, or t
  misc_feature (973)..(973): n is a, c, g, or t
  misc_feature (981)..(981): n is a, c, g, or t
  misc_feature (983)..(983): n is a, c, g, or t
  misc_feature (987)..(987): n is a, c, g, or t
  misc_feature (990)..(990): n is a, c, g, or t
  misc_feature (992)..(994): n is a, c, g, or t
  misc_feature (998)..(998): n is a, c, g, or t
  misc_feature (1000)..(1000): n is a, c, g, or t
  misc_feature (1007)..(1008): n is a, c, g, or t
gcccacgcgtccggcagcagccacatagcaggcgatttgcccagtgatgaagatgaaggagaagatgaaaaattgaacatcctgcccagcaaaagggacttggcggccgagcctgggaacatgtggatgcgattgccctcagactcagcaggcatcccccaggctggcggagaggcagagccacacgccacagcagctggaaaaacagtagccagcccctgcagctcaacagagtctttgtcccagaggtctgtcacctccgtgagggattcggcagatgttgactgtgtgctggacctgtctgtcaagtccagcctttcaggagttgaaaatctgaacagctcttatttctcttcacaggacgtgctgagaagcaacctggtgcaggtgaaggtggagaaagaggcttcctgtgatgagagtgatgttggcactaatgactatgacatggaacatagcactgtgaaagaaagtgtgagcactaataacagggtacagtatgagccggcccatctggctcccctgagggaggactcggtcttgagggagctggaccgggaggacaaagccagtgatgatgagatgatgaccccagagagcgagcgtgtccaggtggagggaggcatggagagcagtctgctcccctacgtctccaacatcctgagccccgcgggccagatcttcatgtgccccctgtgcaacaaggtcttccccagcccccacatcctgcagatccacctgancacgcacttccgcgagcaggacggcatccgcagcaagcccgccgccgatgtcaacgtgcccacgtgctcnctgtgtgggaanactttctcttgcatgtacaccctcaagcgccacganaggactcactcgggggnaaaanccctaaacatgcncccagtgcggnaaaancttccagtactcncanaacctgaccccccatgnccgnggtgnncacccccnanaaaccccncccctgcnantggngcnannncagntncccccannc

SEQ ID NO: 404 - DNA, 1187 bp, Homo sapiens
  misc_feature (832)..(832): n is a, c, g, or t
  misc_feature (856)..(856): n is a, c, g, or t
  misc_feature (915)..(915): n is a, c, g, or t
  misc_feature (918)..(918): n is a, c, g, or t
  misc_feature (932)..(932): n is a, c, g, or t
  misc_feature (949)..(949): n is a, c, g, or t
  misc_feature (957)..(957): n is a, c, g, or t
  misc_feature (961)..(961): n is a, c, g, or t
  misc_feature (972)..(972): n is a, c, g, or t
  misc_feature (974)..(974): n is a, c, g, or t
  misc_feature (981)..(981): n is a, c, g, or t
  misc_feature (993)..(993): n is a, c, g, or t
  misc_feature (997)..(997): n is a, c, g, or t
  misc_feature (1010)..(1011): n is a, c, g, or t
  misc_feature (1028)..(1028): n is a, c, g, or t
  misc_feature (1033)..(1033): n is a, c, g, or t
  misc_feature (1035)..(1035): n is a, c, g, or t
  misc_feature (1041)..(1041): n is a, c, g, or t
  misc_feature (1046)..(1046): n is a, c, g, or t
  misc_feature (1053)..(1053): n is a, c, g, or t
  misc_feature (1064)..(1064): n is a, c, g, or t
  misc_feature (1072)..(1072): n is a, c, g, or t
  misc_feature (1081)..(1081): n is a, c, g, or t
  misc_feature (1090)..(1090): n is a, c, g, or t
  misc_feature (1094)..(1094): n is a, c, g, or t
  misc_feature (1096)..(1096): n is a, c, g, or t
  misc_feature (1100)..(1101): n is a, c, g, or t
  misc_feature (1104)..(1105): n is a, c, g, or t
  misc_feature (1121)..(1121): n is a, c, g, or t
  misc_feature (1132)..(1132): n is a, c, g, or t
  misc_feature (1135)..(1135): n is a, c, g, or t
  misc_feature (1140)..(1140): n is a, c, g, or t
  misc_feature (1150)..(1150): n is a, c, g, or t
  misc_feature (1153)..(1153): n is a, c, g, or t
  misc_feature (1172)..(1172): n is a, c, g, or t
  misc_feature (1174)..(1174): n is a, c, g, or t
  misc_feature (1178)..(1178): n is a, c, g, or t
  misc_feature (1187)..(1187): n is a, c, g, or t
gcccttttccggtcggcgtggtcttgcgagtggagtgtccgctgtgcccgggcctgcaccatgagcgtcccggccttcatcgacatcagtgaagaagatcaggctgctgagcttcgtgcttatctgaaatctaaaggagctgagatttcagaagagaactcggaaggtggacttcatgttgatttagctcaaattattgaagcctgtgatgtgtgtctgaaggaggatgataaagatgttgaaagtgtgatgaacagtgtggtatccctactcttgatcctggaaccagacaagcaagaagctttgattgaaagcctatgtgaaaagctggtcaaatttcgcgaaggtgaacgcccgtctctgagactgcagttgttaagcaaccttttccacgggatggataagaatactcctgtaagatacacagtgtattgcagccttattaaagtggcagcatcttgtggggccatccagtacatcccaactgagctggatcaagttagaaaatggatttctgactggaatctcaccactgaaaaaaagcacacccttttaagactactttatgaggcacttgtggattgtaagaagagtgatgctgcttcaaaagtcatggtggaattgctcggaagttacacagaggacaatgcttcccaggctcgagttgatgcccacaggtgtattgtacgagcattgaaagatccaaatgcatttctttttgaccaccttcttactttaaaaccagtcaagtttttggaaggcgagcttattcatgatcttttaaccatttttgtgagtgctaaaattggcatcatatgtcaagttttatcanaataataaagacttcattgattcncttggcctgttacatgaacagaatatggcaaaaatgaaactacttacttttatgggaanggncagtaaaaaaaaanggaaatttcttttgacncaatgcancaanaacttcaaatngnacctgangatgttgaaacntttngttattgaccccnnaaaaactaaaatggtcnacttncnaaaatngatcnaaccccnaaaaaaaatanttgtccanccaaacccnccctcgganattngnaaannccnngggcaaaaccttttgnaccccttaagnccngaaanaaaatttaanaangggaaaaaccccctttgancntttngaacccggn

SEQ ID NO: 405 - DNA, 1243 bp, Homo sapiens
  misc_feature (814)..(814): n is a, c, g, or t
  misc_feature (861)..(861): n is a, c, g, or t
  misc_feature (888)..(888): n is a, c, g, or t
  misc_feature (901)..(901): n is a, c, g, or t
  misc_feature (924)..(924): n is a, c, g, or t
  misc_feature (926)..(927): n is a, c, g, or t
  misc_feature (942)..(942): n is a, c, g, or t
  misc_feature (951)..(951): n is a, c, g, or t
  misc_feature (984)..(984): n is a, c, g, or t
  misc_feature (988)..(988): n is a, c, g, or t
  misc_feature (1002)..(1002): n is a, c, g, or t
  misc_feature (1010)..(1010): n is a, c, g, or t
  misc_feature (1026)..(1027): n is a, c, g, or t
  misc_feature (1035)..(1035): n is a, c, g, or t
  misc_feature (1038)..(1038): n is a, c, g, or t
  misc_feature (1053)..(1053): n is a, c, g, or t
  misc_feature (1070)..(1070): n is a, c, g, or t
  misc_feature (1079)..(1079): n is a, c, g, or t
  misc_feature (1081)..(1081): n is a, c, g, or t
  misc_feature (1085)..(1085): n is a, c, g, or t
  misc_feature (1087)..(1087): n is a, c, g, or t
  misc_feature (1092)..(1092): n is a, c, g, or t
  misc_feature (1094)..(1094): n is a, c, g, or t
  misc_feature (1096)..(1096): n is a, c, g, or t
  misc_feature (1111)..(1111): n is a, c, g, or t
  misc_feature (1131)..(1131): n is a, c, g, or t
  misc_feature (1144)..(1145): n is a, c, g, or t
  misc_feature (1164)..(1164): n is a, c, g, or t
  misc_feature (1169)..(1169): n is a, c, g, or t
  misc_feature (1181)..(1181): n is a, c, g, or t
  misc_feature (1189)..(1189): n is a, c, g, or t
  misc_feature (1193)..(1193): n is a, c, g, or t
  misc_feature (1197)..(1197): n is a, c, g, or t
  misc_feature (1209)..(1210): n is a, c, g, or t
  misc_feature (1213)..(1213): n is a, c, g, or t
  misc_feature (1215)..(1215): n is a, c, g, or t
  misc_feature (1217)..(1217): n is a, c, g, or t
  misc_feature (1221)..(1221): n is a, c, g, or t
  misc_feature (1224)..(1225): n is a, c, g, or t
  misc_feature (1229)..(1229): n is a, c, g, or t
  misc_feature (1242)..(1242): n is a, c, g, or t
gaggacacagagctgaaacaggtggcttacatatacaagtgtgtcaacacgacattgcaaatcaagggcaaaattaactccattacagtagataactgtaagaaacttggcctggtattcgatgacgtggtgggcattgtggagataatcaacagtaaggatgtcaaagttcaggtaatgggtaaagtgccaaccatatccatcaacaaaacagatggctgccatgcttacctgagcaagaattccctggattgtgaaatagtcagtgccaaatcttccgagatgaatgtcctcattcctacagaaggcggtgactttaatgaattcccagttcctgagcagttcaagaccctatggaacgggcagaagttggtcaccacagtgacagaaattgctggataagcgaagtgccactgggttctttgccctcccttcacaccatgggataaatctgtatcaagacggttcttttctagatttcctctacctttttgctcttaaaactgcttctctgctctgagaagcacagctacctgccttcactgaaatatacctcaggctgaaatttggggtgggatagcaggtcagttgatcttctgcaggaaggtgcagcttttccatatcagctcaaccacgccgccagtccattcttaaggaactgccgactaggactgatgatgcattttagctttgagcttttgggggttattctaccaacaaacagtccattggaaagaaaacagtccctggaattaacagatcagaatgttcacactggttaatctttttttaacaatgagcatgaaggtagcanaagctggtgtgtttccagatggttcttctaaccaaactaatttttcnctgttgacaagcgaggcaagggttgcnctggaaccaaagnctgaggcttggccatctagcatncnnacaaaattgtttccnaaaagcatncctttaatccccaatcaacccggggccgccccnaccngggaaaaagaaaantccctggnactacctgctgaacanngccttcanccnggcagttaatggggncttggacccttttttcntgggatccngnccancncttcntnanaaatgactttaaagnaaaaaaaaaaaagggcggcnccccccaaagggnnccaataacttattaccganctgancccggggaaaancccaaagncccnaacnccctggattttnnaancncngttnccnngggnttttttggggaanc

SEQ ID NO: 406 - DNA, 1068 bp, Homo sapiens
  misc_feature (850)..(850): n is a, c, g, or t
  misc_feature (864)..(864): n is a, c, g, or t
  misc_feature (886)..(886): n is a, c, g, or t
  misc_feature (894)..(894): n is a, c, g, or t
  misc_feature (897)..(897): n is a, c, g, or t
  misc_feature (922)..(922): n is a, c, g, or t
  misc_feature (924)..(924): n is a, c, g, or t
  misc_feature (940)..(940): n is a, c, g, or t
  misc_feature (979)..(979): n is a, c, g, or t
  misc_feature (990)..(990): n is a, c, g, or t
  misc_feature (995)..(995): n is a, c, g, or t
  misc_feature (999)..(999): n is a, c, g, or t
  misc_feature (1021)..(1021): n is a, c, g, or t
  misc_feature (1032)..(1032): n is a, c, g, or t
  misc_feature (1048)..(1048): n is a, c, g, or t
  misc_feature (1051)..(1051): n is a, c, g, or t
  misc_feature (1055)..(1055): n is a, c, g, or t
  misc_feature (1057)..(1058): n is a, c, g, or t
  misc_feature (1063)..(1063): n is a, c, g, or t
  misc_feature (1066)..(1066): n is a, c, g, or t
gccccaacccggacccggcacttctcgggttccgcgactgccgatcgccccggcgcggcaccgctccctcaggagtcgcctaggccgcgcagtctcccgacttctcgtcaggctttcgcgccggcgctccagcaatcactggctggagaaggtgggcgttccggctcgagaggaccctgccgcggctccggaagagcctcgtcctgggcggcggtggtgcggcggtcgccgttatggccactgggctgggcggctgaccgccgggctaggaaagggcccagggccccgaatctcggtggccgctgctccagcgcggcctgcgccatggcctcctccgccgcctcctcggagcatttcgagaagctgcacgagatcttccgcggcctccatgaagacctgtctttccgaaaccccatgatgtctaagcttcgaaactaccggaaggaccttgctaaactccatcgggaggtgagaagcacacctttgacagccacacctggaggccgaggagacatgaaatatggcatatatgctgtagagaatgagcatatgaatcggctacagtctcaaagggcaatgcttctgcagggcactgaaagcctgaaccgggccacccaaagtattgaacgttctcatcggattgccacagagactgaccagattggctcagaaatcatagaagagctgggggaacaacgagaccagttagaacgtaccaagagtagactggtaaacacaagtgaaaacttgagcaaaagtcggaagattctccgttcaatgtccagaaaagtgacaaccaacaagctgctgctttccattatcatcttactggagctcgccatcctgggangcctggtttactanaaattctttcgcagccattganttctatanggnaaggtttgtggacaaaactttgacntngtgaatgcatgatgtnaggatgtgaaaaaaaaacaaatgctgctgtgggctgaanttcaggatgcntgtanaccngctgtgggaggagggagaaaanaaaaacccttnatgggaggaaaacccncanaccntnngattnccngg

SEQ ID NO: 407 - DNA, 895 bp, Homo sapiens
  misc_feature (462)..(462): n is a, c, g, or t
  misc_feature (468)..(468): n is a, c, g, or t
  misc_feature (566)..(566): n is a, c, g, or t
  misc_feature (600)..(600): n is a, c, g, or t
  misc_feature (633)..(633): n is a, c, g, or t
  misc_feature (665)..(665): n is a, c, g, or t
  misc_feature (684)..(684): n is a, c, g, or t
  misc_feature (692)..(692): n is a, c, g, or t
  misc_feature (703)..(703): n is a, c, g, or t
  misc_feature (734)..(734): n is a, c, g, or t
  misc_feature (737)..(737): n is a, c, g, or t
  misc_feature (739)..(739): n is a, c, g, or t
  misc_feature (753)..(753): n is a, c, g, or t
  misc_feature (757)..(757): n is a, c, g, or t
  misc_feature (766)..(767): n is a, c, g, or t
  misc_feature (781)..(781): n is a, c, g, or t
  misc_feature (791)..(791): n is a, c, g, or t
  misc_feature (797)..(797): n is a, c, g, or t
  misc_feature (801)..(801): n is a, c, g, or t
  misc_feature (803)..(803): n is a, c, g, or t
  misc_feature (816)..(816): n is a, c, g, or t
  misc_feature (823)..(823): n is a, c, g, or t
  misc_feature (842)..(843): n is a, c, g, or t
  misc_feature (846)..(846): n is a, c, g, or t
  misc_feature (851)..(851): n is a, c, g, or t
  misc_feature (854)..(854): n is a, c, g, or t
  misc_feature (856)..(856): n is a, c, g, or t
  misc_feature (858)..(858): n is a, c, g, or t
  misc_feature (864)..(865): n is a, c, g, or t
  misc_feature (868)..(868): n is a, c, g, or t
  misc_feature (874)..(874): n is a, c, g, or t
  misc_feature (879)..(879): n is a, c, g, or t
  misc_feature (883)..(883): n is a, c, g, or t
  misc_feature (893)..(893): n is a, c, g, or t
gccagcaagcacgaggcactgaaggagaatggggtcacacatcccatcgactatcacacgactgactacgtggatgagatcaagaagatttcccctaaaggagtggacattgtcatggaccctctgggtgggtcagatactgccaagggctacaacctcctgaaacccatgggcaaagtcgtcacctatggaatggccaacctgctgacgggccccaaacggaacctgatggccctggcccggacatggtggaatcagttcagcgtgacagctctgcagctgctgcaggccaaccgggctgtgtgtggcttccacctgggctacctggatggtgaggtggagctggtcagtggtgtggtggcccgcctcctggctctgtacaaccagggccacatcaagccccacattgactcagtctggcccttcgagaaggtggctgatgccatgaaacagatgcagganaagaanaatgtgggcaaggtcctcctggttccagggccagagaaggagaactagggcaagtggctgtgagaccctagagaccagcgaagggagaagttgggaanctacgttctgttggccaccagacttgcatttcancctctgtcataatgctctgccctccctcccccnaaagtctctgtggtgatgaccgctctccctgncccctccccgcttcctganctctgaanaagttgggaantgaccatttggatgtctgggcccctgccaangcnanaggaaagttcaaangaangcccggctnntttcctgcccccancccttttccnccgganctgntntggttgctttttntaccaanggttaaccaattccccccnngtngggtncantngnttttcnnctnaggccncaatntttntccccatccnct

SEQ ID NO: 408 - DNA, 573 bp, Homo sapiens
  misc_feature (516)..(516): n is a, c, g, or t
  misc_feature (522)..(522): n is a, c, g, or t
  misc_feature (527)..(527): n is a, c, g, or t
  misc_feature (543)..(543): n is a, c, g, or t
  misc_feature (547)..(548): n is a, c, g, or t
  misc_feature (552)..(552): n is a, c, g, or t
  misc_feature (554)..(555): n is a, c, g, or t
  misc_feature (558)..(558): n is a, c, g, or t
  misc_feature (560)..(560): n is a, c, g, or t
  misc_feature (565)..(565): n is a, c, g, or t
  misc_feature (570)..(571): n is a, c, g, or t
ggcccccgccgccctccaaggacggggacgcggtgcagacgccgcagctctacaccaccttcctgccgcctccggagggcgtgcccccgccggagctggcctgcctgcccacccccgagtccacgccggagctgccggtcaagcacctccgcgccgccggggacccctgggagtggaaccagaacaggaacaacgccaaggagggtccgggccgctcacggggcgggcacgcggcgggcgggcccgcgccccgcgtgctggtgaggccaccgccgcccggctgtcccgggcaggccgtggaagtcaccaccctggaggaactgctgcgctacctgcacggcccgcagccgcccagaaagggggccgagccccccgcccctttaacctcgcgggcgctcccgccggagcccgcccccgccctcttgggcggccccagccccaggccccacgagtgcgcctcgccgctgaggctggacgtgccccccgagggcaggtgcgcctctgcccccgcccggnccgcgntctcngcccccgctccccggntggnngtcngnngangncggangttgnntt

SEQ ID NO: 409 - DNA, 954 bp, Homo sapiens
  misc_feature (540)..(540): n is a, c, g, or t
  misc_feature (609)..(609): n is a, c, g, or t
  misc_feature (682)..(682): n is a, c, g, or t
  misc_feature (696)..(696): n is a, c, g, or t
  misc_feature (698)..(698): n is a, c, g, or t
  misc_feature (729)..(729): n is a, c, g, or t
  misc_feature (737)..(737): n is a, c, g, or t
  misc_feature (777)..(777): n is a, c, g, or t
  misc_feature (780)..(780): n is a, c, g, or t
  misc_feature (788)..(788): n is a, c, g, or t
  misc_feature (791)..(791): n is a, c, g, or t
  misc_feature (809)..(809): n is a, c, g, or t
  misc_feature (824)..(825): n is a, c, g, or t
  misc_feature (830)..(830): n is a, c, g, or t
  misc_feature (841)..(841): n is a, c, g, or t
  misc_feature (853)..(853): n is a, c, g, or t
  misc_feature (855)..(855): n is a, c, g, or t
  misc_feature (860)..(860): n is a, c, g, or t
  misc_feature (880)..(880): n is a, c, g, or t
  misc_feature (882)..(882): n is a, c, g, or t
  misc_feature (884)..(884): n is a, c, g, or t
  misc_feature (887)..(887): n is a, c, g, or t
  misc_feature (895)..(895): n is a, c, g, or t
  misc_feature (898)..(898): n is a, c, g, or t
  misc_feature (902)..(902): n is a, c, g, or t
  misc_feature (906)..(906): n is a, c, g, or t
  misc_feature (914)..(915): n is a, c, g, or t
  misc_feature (919)..(919): n is a, c, g, or t
  misc_feature (922)..(922): n is a, c, g, or t
  misc_feature (924)..(924): n is a, c, g, or t
  misc_feature (934)..(934): n is a, c, g, or t
  misc_feature (947)..(947): n is a, c, g, or t
gggaagatggcggaggtgggggagataatcgagggctgccgcctacccgtgctgcggcggaaccaggacaacgaagatgagtggcccctggccgagatcctgagcgtgaaggacatcagtggccggaagcttttctacgtccattacattgacttcaacaaacgtctggatgaatgggtgacgcatgagcggctggacctaaagaagatccagttccccaagaaagaggccaagacccccactaagaacggacttcctgggtcccgtcctggctctccagagagagaggtgaaacggaaggtggaggtggtttcaccagcaactccagtgcccagcgagacagccccggcctcggtttttccccagaatggagccgcccgtagggcagtggcagcccagccaggacggaagcgaaaatcgaattgtttgggcactgatgaggactcccaggacagctctgatggaataccgtcagcaccacgcatgactggcagcctggtgtctgatcgaagccacgacgacatcgtcacccggatgaanaacattgagtgcattgagctgggccggcaccgcctcaagccgtggtacttctccccgtacccacagganctcaccacattgcctgtcctctacctgtgcgagttctgcctcaagtacggccgtattctcaagtgtctttcancgttcatttgaccnantgtgacctacgacatccttccaggcaatganatttaccncaagggcaccatcttccttctttgaaattgatggaacgtnaanaacaaaanttnttcccaaaaacctgtgtntttttggcccaattnntttcnttgaacataanaccctgtatttntnaaaanaaaccctttcctctttctantntnganaaaattanaantgtnaggntttcccanntctnggncntattctcccnggaaaaaaaaatnaacggaa

SEQ ID NO: 410 - DNA, 956 bp, Homo sapiens
  misc_feature (780)..(780): n is a, c, g, or t
  misc_feature (785)..(785): n is a, c, g, or t
  misc_feature (805)..(805): n is a, c, g, or t
  misc_feature (814)..(814): n is a, c, g, or t
  misc_feature (828)..(828): n is a, c, g, or t
  misc_feature (831)..(831): n is a, c, g, or t
  misc_feature (870)..(870): n is a, c, g, or t
  misc_feature (876)..(876): n is a, c, g, or t
  misc_feature (891)..(891): n is a, c, g, or t
  misc_feature (894)..(894): n is a, c, g, or t
  misc_feature (899)..(899): n is a, c, g, or t
  misc_feature (903)..(903): n is a, c, g, or t
  misc_feature (907)..(907): n is a, c, g, or t
  misc_feature (921)..(921): n is a, c, g, or t
  misc_feature (924)..(927): n is a, c, g, or t
  misc_feature (930)..(930): n is a, c, g, or t
  misc_feature (932)..(932): n is a, c, g, or t
  misc_feature (935)..(935): n is a, c, g, or t
  misc_feature (937)..(937): n is a, c, g, or t
  misc_feature (941)..(941): n is a, c, g, or t
  misc_feature (945)..(945): n is a, c, g, or t
  misc_feature (947)..(947): n is a, c, g, or t
gccggcggtgacaacggcaacatggccctgaacggagctgaagtcgacgacttctcctgggagcccccgactgaggcggagacgaaggtgctgcaggcgcgacgggagcggcaagatcgcatctcccggctcatgggcgactatctgctgcgcggttaccgcatgctgggcgagacgtgtgcggactgcgggacgatcctcctccaagacaaacagcggaaaatctactgcgtggcttgtcaggaactcgactcagacgtggataaagataatcccgctctgaatgcccaggctgccctctcccaagctcgggagcaccagctggcctcagcctcagagctccccctgggctctcgacctgcgccccagcccccagtacctcgtccggagcactgtgagggagctgcagcaggactcaaggcagcccaggggccacctgctcctgctgtgcctccaaatacagatgtcatggcctgcacacagacagccctcttgcagaagctgacctgggcctctgctgaactgggctctagcacctccctggagactagcatccagctgtgtggccttatccgcgcatgtgcggaggccctgcgcagcctgcagcagctacagcactaagagaagcccctgagaaaaaccctctagaaaaacagctgttcctctgtgtggtttgtttttttcctggttccaagtgtgcatgccagccccagctccactcacctttttccagcttttggcctcttcacctctccactctgttctccttgacgccctganatganttgagcttgtttcttctcantttccccantcaggatgagggantangtaaaggactatgtgatgcccctttttctaaggaaaaanccatancctttttcaaagtancanccaangggnggancctaaccttgtttntgnnnnacntntgnancctnttcncntttggggtc

SEQ ID NO: 411 - DNA, 1196 bp, Homo sapiens
  misc_feature (848)..(848): n is a, c, g, or t
  misc_feature (850)..(850): n is a, c, g, or t
  misc_feature (864)..(864): n is a, c, g, or t
  misc_feature (901)..(901): n is a, c, g, or t
  misc_feature (917)..(917): n is a, c, g, or t
  misc_feature (942)..(942): n is a, c, g, or t
  misc_feature (958)..(958): n is a, c, g, or t
  misc_feature (960)..(960): n is a, c, g, or t
  misc_feature (965)..(965): n is a, c, g, or t
  misc_feature (967)..(967): n is a, c, g, or t
  misc_feature (982)..(982): n is a, c, g, or t
  misc_feature (995)..(995): n is a, c, g, or t
  misc_feature (1003)..(1003): n is a, c, g, or t
  misc_feature (1040)..(1041): n is a, c, g, or t
  misc_feature (1063)..(1063): n is a, c, g, or t
  misc_feature (1069)..(1071): n is a, c, g, or t
  misc_feature (1077)..(1077): n is a, c, g, or t
  misc_feature (1081)..(1082): n is a, c, g, or t
  misc_feature (1084)..(1084): n is a, c, g, or t
  misc_feature (1092)..(1093): n is a, c, g, or t
  misc_feature (1112)..(1112): n is a, c, g, or t
  misc_feature (1123)..(1124): n is a, c, g, or t
  misc_feature (1129)..(1129): n is a, c, g, or t
  misc_feature (1137)..(1137): n is a, c, g, or t
  misc_feature (1139)..(1139): n is a, c, g, or t
  misc_feature (1153)..(1153): n is a, c, g, or t
  misc_feature (1169)..(1169): n is a, c, g, or t
  misc_feature (1181)..(1181): n is a, c, g, or t
  misc_feature (1191)..(1192): n is a, c, g, or t
ggcagcatggcggcgggggcggctgaggcagctgtagcggccgtggaggaggtcggctcagccgggcagtttgaggagctgctgcgcctcaaagccaagtccctccttgtggtccatttctgggcaccatgggctccacagtgtgcacagatgaacgaagttatggcagagttagctaaagaactccctcaagtttcatttgtgaagttggaagctgaaggtgttcctgaagtatctgaaaaatatgaaattagctctgttcccacttttctgtttttcaagaattctcagaaaatcgaccgattagatggtgcacatgccccagagttgaccaaaaaagttcagcgacatgcatctagtggctccttcctacccagcgctaatgaacatcttaaagaagatctcaaccttcgcttgaagaaattgactcatgctgccccctgcatgctgtttatgaaaggaactcctcaagaaccacgctgtggtttcagcaagcagatggtggaaattcttcacaaacataatattcagtttagcagttttgatatcttctcagatgaagaggttcgacagggactcaaagcctattccagttggcctacctatcctcagctctatgtttctggagagctcataggaggacttgatataattaaggagctagaagcatctgaagaactagatacaatttgtcccaaagctcccaaattagaggaaaggctcaaagtgctgacaaataaaagcttctgtgatgctctttatgaaaggaaacaaacaggaagcaaaatgtggattcagcaaacaaattctggaaatactaatagtactggggttgaatatgaaacatncnatatattggaggangaaaaaattcggcaaggattaaagcttactcaaaatnggccaacatacccccnacctgtatgtgaaaggggaactggnggaggattggaaattngngaagnanctgaaaaaaaatggngaattgctgcctntactgganagaaaaaaataaaaaatcttaaacttggggcccactnntggaaaaaaattttattacttngggacnnnttctgnattnntnccccaaannggactaagaaaaaaaaatncccgccttccnnaaaangtttgggnanttccaaggccggcnaaaaaaaggaggtaanttttttcccccnaaaaaaaggnnaaaa

SEQ ID NO: 412 - DNA, 1106 bp, Homo sapiens
  misc_feature (756)..(756): n is a, c, g, or t
  misc_feature (778)..(778): n is a, c, g, or t
  misc_feature (863)..(863): n is a, c, g, or t
  misc_feature (865)..(865): n is a, c, g, or t
  misc_feature (867)..(867): n is a, c, g, or t
  misc_feature (891)..(891): n is a, c, g, or t
  misc_feature (928)..(928): n is a, c, g, or t
  misc_feature (933)..(933): n is a, c, g, or t
  misc_feature (951)..(951): n is a, c, g, or t
  misc_feature (984)..(984): n is a, c, g, or t
  misc_feature (992)..(993): n is a, c, g, or t
  misc_feature (1009)..(1009): n is a, c, g, or t
  misc_feature (1012)..(1012): n is a, c, g, or t
  misc_feature (1018)..(1019): n is a, c, g, or t
  misc_feature (1030)..(1031): n is a, c, g, or t
  misc_feature (1049)..(1050): n is a, c, g, or t
  misc_feature (1054)..(1054): n is a, c, g, or t
  misc_feature (1056)..(1056): n is a, c, g, or t
  misc_feature (1063)..(1063): n is a, c, g, or t
  misc_feature (1065)..(1065): n is a, c, g, or t
  misc_feature (1074)..(1074): n is a, c, g, or t
  misc_feature (1081)..(1081): n is a, c, g, or t
  misc_feature (1086)..(1086): n is a, c, g, or t
  misc_feature (1088)..(1088): n is a, c, g, or t
  misc_feature (1093)..(1093): n is a, c, g, or t
  misc_feature (1095)..(1096): n is a, c, g, or t
  misc_feature (1099)..(1099): n is a, c, g, or t
  misc_feature (1105)..(1105): n is a, c, g, or t
gcccacgcgtccggcgagacttcctgctcatctgccgctccctttgccgccgccttagcccgggacccgaacccagcctctcccctacccgaacaccggccccggctccaccgaggcccgggtcccccagcccgtctcgccgccgccatggcggaccctaaatacgccgaccttcccggcattgccaggaatgagccagatgtttatgaaactagcgacctacctgaggatgatcaagcggagttcgatgcgtttgcacaagagctggaggagctgacaagcacaagtgtggaacacatcattgtcaatcctaatgctgcctatgacaagttcaaggacaagagagtggggacaaagggacttgatttctcagatcgtattggaaaaaccaagaggacaggatatgaatctggagaatatgagatgcttggagagggtctgggagtgaaggagacaccccagcaaaagtaccagcgcctactgcatgaggtccaagagctgacaactgaagttgaaaaaatcaagacgacagtgaaggagtcagccacagaggagaagctgacccctgtgttgctggctaaacagctggcagccctgaagcagcagctggttgcttcccacctggagaagctgctgggaccagatgctgcaatcaaccttaccgaccccgatggcgccctggctaagcgcctactactgcagctggaagcaacaaagaacagcaaaggggggatcaggggggaaaaaccactgggnacccccccagatagcagccttngtcactttatgaactacatttctcggcctgagcaggacaagttttctcagctgccaaagtcgcaaaacttgaaaagcgccctganananctggaaaagctgtacgttgtgatnaaggatgctcaaaatcccctttctggcaggtctacanggaanctgttttcatggaaaatngtaaagctgttgcaaacaaaggggaaccgcccntaaacctnncatttttggaatcaanggnaagccnngcttaaaaaannttctgggaaaaggggaannaaantncccaacntnaaacctttntaaaaantcaanancaaancnnggngccccnc

SEQ ID NO: 413 - DNA, 985 bp, Homo sapiens
  misc_feature (653)..(653): n is a, c, g, or t
  misc_feature (707)..(707): n is a, c, g, or t
  misc_feature (741)..(741): n is a, c, g, or t
  misc_feature (803)..(803): n is a, c, g, or t
  misc_feature (809)..(809): n is a, c, g, or t
  misc_feature (811)..(811): n is a, c, g, or t
  misc_feature (815)..(815): n is a, c, g, or t
  misc_feature (835)..(835): n is a, c, g, or t
  misc_feature (846)..(846): n is a, c, g, or t
  misc_feature (850)..(850): n is a, c, g, or t
  misc_feature (853)..(853): n is a, c, g, or t
  misc_feature (856)..(856): n is a, c, g, or t
  misc_feature (860)..(860): n is a, c, g, or t
  misc_feature (862)..(862): n is a, c, g, or t
  misc_feature (867)..(867): n is a, c, g, or t
  misc_feature (871)..(871): n is a, c, g, or t
  misc_feature (876)..(876): n is a, c, g, or t
  misc_feature (884)..(885): n is a, c, g, or t
  misc_feature (889)..(889): n is a, c, g, or t
  misc_feature (891)..(891): n is a, c, g, or t
  misc_feature (904)..(904): n is a, c, g, or t
  misc_feature (906)..(906): n is a, c, g, or t
  misc_feature (917)..(918): n is a, c, g, or t
  misc_feature (926)..(926): n is a, c, g, or t
  misc_feature (929)..(929): n is a, c, g, or t
  misc_feature (937)..(937): n is a, c, g, or t
  misc_feature (940)..(940): n is a, c, g, or t
  misc_feature (943)..(943): n is a, c, g, or t
  misc_feature (947)..(947): n is a, c, g, or t
  misc_feature (953)..(953): n is a, c, g, or t
  misc_feature (960)..(960): n is a, c, g, or t
  misc_feature (967)..(967): n is a, c, g, or t
  misc_feature (975)..(975): n is a, c, g, or t
  misc_feature (985)..(985): n is a, c, g, or t
ggctcgcgatgcctctacacaagtatcccgtgtggctctggaagcggctgcagctgcgggagggcatctgttcccgcctgcccggccactacctgcgctccctggaggaggagcggacgcccactcccgtgcactataggcctcatggggccaagttcaagatcaaccccaagaacgggcagcgggagcgtgtggaggacgtgcccattcccatctactttccccccgaatcccagcgggggttgtggggcggcgagggctggatcctgggccaaatatatgccaacaacgacaagctctccaagaggctgaagaaagtgtggaagccacagctgtttgagcgagagttctacagtgagatcctggacaagaagttcacagtgactgtgaccatgcggaccctggacctcatcgatgaggcttacgggctcgacttttacatcctcaagaccccgaaggaggacctgtgctccaagtttgggatggacctgaagcgagggatgctgctgcggcttgcccggcaggacccccagctgcaccccgaggaccccgagcggcgggcagccatctacgacaagtacaaggaatttgccatcccagaggaggaggcagagtgggtgggcctcacgctggaggaggccattgagaagcanagacttttggaggaaaaggaccctgtacccctgttcaagatctatgtggcgganctgatccagcagctgcagcagcaggcactgtcanagccggcggtggtgcaaaaaaaagccagtggccagtgaccacacagctcctccatgcctgancaaaangnccanctttccctgccaggcctttngcactgagganacanatnccngggnanctgtnaggnccccngtgggcanngggngnatcctggtttcgngngctgcccatgnncctttcanccnggggccanctnggnaggnatcccnagaagcntgggccncccaaagntcctctaggn

SEQ ID NO: 414 - DNA, 1089 bp, Homo sapiens
  misc_feature (849)..(849): n is a, c, g, or t
  misc_feature (853)..(853): n is a, c, g, or t
  misc_feature (874)..(874): n is a, c, g, or t
  misc_feature (883)..(883): n is a, c, g, or t
  misc_feature (907)..(907): n is a, c, g, or t
  misc_feature (916)..(916): n is a, c, g, or t
  misc_feature (918)..(918): n is a, c, g, or t
  misc_feature (922)..(922): n is a, c, g, or t
  misc_feature (926)..(926): n is a, c, g, or t
  misc_feature (952)..(952): n is a, c, g, or t
  misc_feature (1004)..(1005): n is a, c, g, or t
  misc_feature (1018)..(1018): n is a, c, g, or t
  misc_feature (1032)..(1032): n is a, c, g, or t
  misc_feature (1039)..(1039): n is a, c, g, or t
  misc_feature (1043)..(1043): n is a, c, g, or t
  misc_feature (1045)..(1046): n is a, c, g, or t
  misc_feature (1055)..(1056): n is a, c, g, or t
  misc_feature (1063)..(1063): n is a, c, g, or t
  misc_feature (1065)..(1065): n is a, c, g, or t
  misc_feature (1069)..(1069): n is a, c, g, or t
  misc_feature (1077)..(1078): n is a, c, g, or t
  misc_feature (1085)..(1085): n is a, c, g, or t
  misc_feature (1089)..(1089): n is a, c, g, or t
gccgtgaagaaggcagataaagtggagcagaggaagctgctggaaaagtgtgccatgaccgctctgagctccaagctgatctcccagcagaaagctttctttgctaagatggtggtggatgcagtgatgatgctcgatgatttgctgcagcttaaaatgattggaatcaagaaggtacagggtggagccctcgaggattctcagctggtagctggtgttgcattcaagaagactttctcttacgctgggtttgaaatgcaacccaaaaagtaccacaatcccaagattgcccttttgaatgtcgagctcgagttgaaagctgagaaagacaatgctgagataagagtccacacagttgaggattatcaggcaattgttgatgctgagtggaacattctctatgacaagttagagaagatccatcattctggagccaaagttgtcttgtccaaactccccattggggatgtggccacccagtactttgctgacagggacatgttctgtgctggccgagtacctgaggaggatctgaagaggacaatgatggcctgtggaggctcaatccagaccagtgtgaatgctctgtcagcagatgtgctgggtcgatgccaggtgtttgaagagacccagattggaggcgagaggtacaatttttttactggctgccccaaggccaagacatgcaccttcattctccgtggcggcgccgagcagtttatggaggagacagagcggtctctgcatgatgccatcatgatcgtcaggagggccatcaagaatgattcagtggtggctggtggcggggccattgagatggaactctccaagtacctgcgggattactcnaggnactattccaggaaaacagcanctgttgatnggggcatatgccaaggccttgganattatcccncnccanctgngtgacaatgctggctttgatgccccnaacattctcaaaagctgcgggctcggcatgcccaggggggtacatggtatgnntaaacttcacacnaggacttgctgacnctttgancttncnnggggacccnnttggggngnatantgcctganncaccccngagn

SEQ ID NO: 415 - DNA, 1167 bp, Homo sapiens
  misc_feature (826)..(826): n is a, c, g, or t
  misc_feature (828)..(828): n is a, c, g, or t
  misc_feature (840)..(840): n is a, c, g, or t
  misc_feature (882)..(882): n is a, c, g, or t
  misc_feature (910)..(910): n is a, c, g, or t
  misc_feature (926)..(926): n is a, c, g, or t
  misc_feature (930)..(930): n is a, c, g, or t
  misc_feature (941)..(942): n is a, c, g, or t
  misc_feature (957)..(957): n is a, c, g, or t
  misc_feature (971)..(971): n is a, c, g, or t
  misc_feature (991)..(991): n is a, c, g, or t
  misc_feature (998)..(998): n is a, c, g, or t
  misc_feature (1013)..(1013): n is a, c, g, or t
  misc_feature (1026)..(1026): n is a, c, g, or t
  misc_feature (1038)..(1038): n is a, c, g, or t
  misc_feature (1043)..(1043): n is a, c, g, or t
  misc_feature (1049)..(1049): n is a, c, g, or t
  misc_feature (1058)..(1058): n is a, c, g, or t
  misc_feature (1064)..(1064): n is a, c, g, or t
  misc_feature (1066)..(1066): n is a, c, g, or t
  misc_feature (1071)..(1071): n is a, c, g, or t
  misc_feature (1081)..(1081): n is a, c, g, or t
  misc_feature (1092)..(1093): n is a, c, g, or t
  misc_feature (1099)..(1099): n is a, c, g, or t
  misc_feature (1101)..(1101): n is a, c, g, or t
  misc_feature (1105)..(1105): n is a, c, g, or t
  misc_feature (1113)..(1113): n is a, c, g, or t
  misc_feature (1115)..(1115): n is a, c, g, or t
  misc_feature (1123)..(1123): n is a, c, g, or t
  misc_feature (1139)..(1139): n is a, c, g, or t
  misc_feature (1150)..(1151): n is a, c, g, or t
  misc_feature (1156)..(1156): n is a, c, g, or t
  misc_feature (1158)..(1158): n is a, c, g, or t
  misc_feature (1160)..(1161): n is a, c, g, or t
  misc_feature (1163)..(1163): n is a, c, g, or t
  misc_feature (1166)..(1166): n is a, c, g, or t
gggcgagggagagccaggaggcggaagttcccgcgggcggtggggacggcgccctcaccgcgagtcacttgtcagcccttgtctgaggcggaggcagccccgcgccgcgccggacccgagcatatttcattttctgtcattggactttgagccattagaaccatgagcaactacagtgtgtcactggttggcccagctccttggggtttccggctgcagggcggtaaggatttcaacatgcctctgacaatctctagtctaaaagatggcggcaaggcagcccaggcaaatgtaagaataggcgatgtggttctcagcattgatggaataaatgcacaaggaatgactcatcttgaagcccagaataagattaagggttgtacaggctctttgaatatgactctgcaaagagcatctgctgcacccaagcctgagccggttcctgttcaaaagggagaacctaaagaagtagttaaacctgtgcccattacatctcctgctgtgtccaaagtcacttccacaaacaacatggcctacaataaggcaccacggccttttggttctgtgttttcaccaaaagtcacatccatcccatcaccatcgtctgccttcaccccagcccatgcgaccacctcatcacatgcttccccttcacccgtggctgccgtcactcctcccctgttcgctgcatctggactgcatgctaatgccaatcttagtgctgaccagtctccatctgcactgagcgctggtaaaactgcagttaatgtcccacggcagcccacagtcaccagcgtgtgttccgagacttctcaggagctagcanangggacagagaanaggatcccagggtgacagtaaacagcaaaatggcccaccaanaaaacacattgtggagcgctatacaaanttttatcatgtacccnctcncagtgatgccnncaaaaaaaactgatngaggatctgaaaantggcgtccaaggactggaanaactcantctcccttttccaantcttgcccaaatncctgggacgaanatttnaaaatntgaacccanaatacnanaaggnaaggaaaaanccccttccccnntttatncnaaanccaaaatncntgactggnccctgaaatttccccngggctttaacnnaaagnantnnanacnt

SEQ ID NO: 416 - DNA, 821 bp, Homo sapiens
  misc_feature (649)..(649): n is a, c, g, or t
  misc_feature (668)..(668): n is a, c, g, or t
  misc_feature (679)..(679): n is a, c, g, or t
  misc_feature (681)..(681): n is a, c, g, or t
  misc_feature (692)..(692): n is a, c, g, or t
  misc_feature (701)..(701): n is a, c, g, or t
  misc_feature (723)..(723): n is a, c, g, or t
  misc_feature (744)..(744): n is a, c, g, or t
  misc_feature (752)..(752): n is a, c, g, or t
  misc_feature (754)..(754): n is a, c, g, or t
  misc_feature (759)..(759): n is a, c, g, or t
  misc_feature (761)..(761): n is a, c, g, or t
  misc_feature (771)..(771): n is a, c, g, or t
  misc_feature (774)..(774): n is a, c, g, or t
  misc_feature (776)..(776): n is a, c, g, or t
  misc_feature (779)..(779): n is a, c, g, or t
  misc_feature (788)..(788): n is a, c, g, or t
  misc_feature (801)..(801): n is a, c, g, or t
  misc_feature (803)..(804): n is a, c, g, or t
  misc_feature (811)..(811): n is a, c, g, or t
  misc_feature (814)..(814): n is a, c, g, or t
  misc_feature (818)..(818): n is a, c, g, or t
  misc_feature (820)..(820): n is a, c, g, or t
gacatcagcaagagatgtctactaggcagtagggcacatggatgtgaagcctatgaagcagatttgggctgtagctgtagatctgggtgggggttctcagccctggggcttcaccctatcctcctccaaagccctaccctctgcctgaggccaggtccccagtccctagccccttcccccgccaggtgtacagtgccgatggagagttcctcttcaagtttggctcccatggcgagggcaatgggcagttcaatgcccccacaggagtagctgtggactccaatggaaacatcattgtggctgactggggcaacagccgcatccaggtattcgacagctctggctccttcctgtcctatatcaacacatctgcagaaccactgtatggtccacagggcctggcactgacctcggatggccatgtggtggtggctgatgctggcaaccactgctttaaagcctatcgctacctccagtagctgtacagaggccctgcctggcttgtggagggacagacattggggtgattggacctggcagcactgaatgtgggctgtgggcatgggtgcacccggtgccctccctctcctacccccacccccacggttgcactttatttattcggttcttgctttggtgactgggtgancctggactgtggtcccaangatgtgtgcanancttcaccctanccttcttanacacctccccacccctggtcantctgctccccatccccccaancctggggncnaaaanancctaccccanganangantccctctanttgtctcccctancnncctatanacnctgnana

SEQ ID NO: 417 - DNA, 871 bp, Homo sapiens
gctcagaagttgtcatcagtcagaggcaatcatattatctcagggacatgcgcatcatggcgtggcaagagccttcgggttcagaagatcaggccttctatcctgggctgcaacatccttcgagttgaatattccttactgatctatgttagcgttcctggatccaagaaggtcatccttgacctgcccctggtaattggcagatcaggtctaagcagcagaacatccagcatggccagccgaaccagctctgagatgagttgggtagatctgaacatccctgataccccagaagctcctccctgctatatggatgtcattcctgaagatcaccgattggagagcccaaccactcctctgctagatgacatggatggctctcaagacagccctatctttatgtatgcccctgagttcaagttcatgccaccaccgacttatactgaggtggatccctgcatcctcaacaacaatgtgcagtgagcatgtggaagaaaagaagcagctttacctacttgtttctttttgtctctcttcctggacactcactttttcagagactcaacagtctctgcaatggagtgtgggtccaccttagcctctgacttcctaatgtaggaggtggtcagcaggcaatctcctgggccttaaaggatgcggactcatcctcagccagcgcccatgttgtgatacaggggtgtttgttggatgggtttaaaaataactagaaaaactcaggcccatccattttctcagatctccttgaaaattgaggccttttcgatagtttcgggtcagtaaaaatggcctcctggcgtaagcttttcaaggttttttggaggctttttgtaaattgtgataggaactttgg

SEQ ID NO: 418 - DNA, 869 bp, Homo sapiens
ggaggcacagaggctccgggaggcagcgctgccccccgcgccccgcaccgctgcgggacccgcgccgcgagaggggcggacttcggcgcctcgcgcgtccgccggcgcctgggttggcgctgcggggcggaggcggtgtctgagcgccgctccggctctgctctctctcgagcttcggcacccgcccgagccgctcgcgcgcccgccacctgtctgcccactcggctgtctgtctgccctcccgccgccagctcctgcctcgggcctgccctctccggtctcggtgctccgaggggcgacgagaagcgcgacggggccgtggcgcaccgggcagggcgcgcggggcgcacggcctgggggcgcacggtgcggcgccggcccatgaggctttccagcgcggggagcggcagcgccggccggccatggggggtagcctgcgggtggccgttctaggcgccccgggcgtgggcaagacggccatcatccgccagttcctgttcggtgactaccccgagcgccaccggcccacggacgggccgcgcctctaccgacccgcggtgctgctcgacggcgccgtctacgacttgagcatccgcgacggcgacgtcgctggccccggctcgagccccgggggtccggaggagtggccagacgctaaggactggagcttgcaggacacggacgccttcgtgctcgtctacgacatctgcagcccggacagtttcgactacgtgaaggccctgcggcagcgcatcgcggagaccaggccggcgggcgcgcccgaagcgcccatcctcgtggtaggcaacaagcgggacaggcagcggctgcgcttcggaccgcggcgcgcgctggccgccctagtgcgc

SEQ ID NO: 419 - DNA, 1069 bp, Homo sapiens
  misc_feature (707)..(707): n is a, c, g, or t
  misc_feature (727)..(727): n is a, c, g, or t
  misc_feature (737)..(737): n is a, c, g, or t
  misc_feature (743)..(743): n is a, c, g, or t
  misc_feature (764)..(764): n is a, c, g, or t
  misc_feature (779)..(779): n is a, c, g, or t
  misc_feature (785)..(785): n is a, c, g, or t
  misc_feature (795)..(795): n is a, c, g, or t
  misc_feature (834)..(834): n is a, c, g, or t
  misc_feature (855)..(855): n is a, c, g, or t
  misc_feature (859)..(859): n is a, c, g, or t
  misc_feature (863)..(863): n is a, c, g, or t
  misc_feature (872)..(872): n is a, c, g, or t
  misc_feature (884)..(885): n is a, c, g, or t
  misc_feature (888)..(888): n is a, c, g, or t
  misc_feature (893)..(893): n is a, c, g, or t
  misc_feature (908)..(909): n is a, c, g, or t
  misc_feature (911)..(911): n is a, c, g, or t
  misc_feature (918)..(918): n is a, c, g, or t
  misc_feature (922)..(922): n is a, c, g, or t
  misc_feature (941)..(941): n is a, c, g, or t
  misc_feature (945)..(945): n is a, c, g, or t
  misc_feature (947)..(947): n is a, c, g, or t
  misc_feature (952)..(952): n is a, c, g, or t
  misc_feature (954)..(954): n is a, c, g, or t
  misc_feature (963)..(964): n is a, c, g, or t
  misc_feature (975)..(976): n is a, c, g, or t
  misc_feature (980)..(981): n is a, c, g, or t
  misc_feature (1000)..(1002): n is a, c, g, or t
  misc_feature (1014)..(1014): n is a, c, g, or t
  misc_feature (1016)..(1016): n is a, c, g, or t
  misc_feature (1029)..(1029): n is a, c, g, or t
  misc_feature (1049)..(1049): n is a, c, g, or t
  misc_feature (1062)..(1062): n is a, c, g, or t
  misc_feature (1064)..(1064): n is a, c, g, or t
  misc_feature (1066)..(1066): n is a, c, g, or t
gcccacgcgtccgagcagagtattggtgctgctggaagccagaaggaaggtccagagggagccaacctgttcatctaccacctgccccaggagtttggtgatcaggacctgctgcagatgtttatgccctttgggaatgtcgtgtctgccaaggttttcatagacaagcagacaaacctgagcaagtgttttggttttgtaagttacgacaatcctgtttcggcccaagctgccatccagtccatgaacggctttcagattggcatgaagcggcttaaagtgcagctcaaacgttcgaagaatgacagcaagccctactgagcgtgctcccctctgagactggagtgagagggtcttctggtaagtgggggaggagcacccttaatgattcgaagccctgaggctgtgtgttgacagccctggaccctgatccctgccactctcgcaggcacagcttgccctgaagactcggctactgccttctgtgggagtttcgcttcgtacagaggacaagtttgtgctttggtttccagtgttttactttggagtttaggtgccatatcctgaggttttttttgtttttgtttttgtttctcctttatttaaagtttgctgtgtttgtaaccagtgtgtgttgagaaggaccaacaccaaaccaccctggggaagggggacagggaaacatttaacacagacgatgatcaggnatttgccccaaaccaccccnagaaaaaagnactgantggaacaaaaaagtgaccccnaaaacctcctcttantgtganggtgggttanaatgaaaactgacccctgggaacctgtggggaacaaaancggcctttgggggaaaaaatnggantgancaaaacccntaatgccctggnnagntgganaactcaaactcctgnnanagctacntttngggaaaaaattttttgaancccnanttttncnaaatctttnnccggaaatttnnggcnngcccttttcaaaaaaaggnnntttaacaattcncnggaaaaaaaacancctgttaaccccgaaataancaaaaaaaggggngnanccc

SEQ ID NO: 420 - DNA, 807 bp, Homo sapiens
ggcgccccctacgggctactgtccgggtaccccgcgatgtacccggcgcctcagtaccaagggcacttccagctcttccgcgggctccagggacccgcgcccggtcccgccacgtccccctccttcctgagttgtttgggacccgggacggtgggcactggactcggggggactgcagaggatccaggtgtgatagccgagaccgcgccatccaagcgaggccgacgttcgtgggcgcgcaagaggcaggcagcgcacacgtgcgcgcacccgggttgcggcaagagctacaccaagagctcccacctgaaggcgcatctgcgcacgcacacaggggagaagccatacgcctgcacgtgggaaggctgcggctggagattcgcgcgctcggacgagctgacccgccactaccggaaacacacggggcagcgccccttccgctgccagctctgcccacgtgctttttcgcgctctgaccacctggccttgcacatgaagcgccacctttgagccctgccctggcacttggactctcctagtgactggggatgggacaagaagcctgtttggtggtctcttcacacggacgcgcgtgacacaatgctgggtggttttcccacgaatggaccctctcctggactcgcgttcccaaagatccacccaaatatcaaacacggacccatagacagccctggggggagcctcttacggaaaatccgacaagccttcagccacagggagccacacagagatgtccaaactgtcgtgcaaacccagtgagacagaccgccaaataaacggactcag

SEQ ID NO: 421 - DNA, 1087 bp, Homo sapiens
  misc_feature (830)..(830): n is a, c, g, or t
  misc_feature (834)..(834): n is a, c, g, or t
  misc_feature (880)..(880): n is a, c, g, or t
  misc_feature (889)..(889): n is a, c, g, or t
  misc_feature (892)..(892): n is a, c, g, or t
  misc_feature (908)..(908): n is a, c, g, or t
  misc_feature (916)..(916): n is a, c, g, or t
  misc_feature (947)..(947): n is a, c, g, or t
  misc_feature (958)..(958): n is a, c, g, or t
  misc_feature (969)..(969): n is a, c, g, or t
  misc_feature (983)..(983): n is a, c, g, or t
  misc_feature (987)..(987): n is a, c, g, or t
  misc_feature (1004)..(1004): n is a, c, g, or t
  misc_feature (1059)..(1059): n is a, c, g, or t
  misc_feature (1068)..(1068): n is a, c, g, or t
  misc_feature (1073)..(1073): n is a, c, g, or t
  misc_feature (1082)..(1082): n is a, c, g, or t
gcaaatacagccatgaagaaaaaggtgctgctgatggggaagagcgggtcggggaagaccagcatgaggtcgataatcttcgccaattacattgctcgcgacacccggcgcctgggggccaccattgacgtggaacactcccacgtccgattcctagggaacctggtgctgaacctgtgggactgtggcggtcaggacaccttcatggaaaattacttcaccagccagcgagacaatatcttccgtaacgtggaagttttgatttacgtgtttgacgtggagagccgcgaactggaaaaggacatgcattattaccagtcgtgtctggaggccatcctccagaactctcctgacgccaaaatcttctgcctggtgcacaaaatggatctggttcaggaggatcagcgtgacctgatttttaaagagcgagaggaagacctgaggcgtctgtctcgcccgctggagtgtgcttgttttcgaacgtccatctgggatgagacgctctacaaagcctggtccagcatcgtctaccagctgattcccaacgttcagcagctggagatgaacctcaggaattttgcccaaatcattgaggccgatgaagttctgctgttcgaaagagctacattcttggttatttcccactaccagtgcaaagagcagcgcgacgtccaccggtttgagaagatcagcaacatcatcaaacagttcaagctgagctgcagtaaattggccgcttccttccagagcatggaagttaggaattccaacttcgctgctttcatcgacatcttcacctcaaatacgtacgtgatgggtggtcatgtcanatcngtcgatcccttctgcgggccactctgatcaacattcgcaatggccngaaaacacnttngaaaaactggaaaaantggatggnccccaaccacagtcccccttatgcgttgaanattgccaaatngctctttccgnaaaatgctgaaatngccnttttttgtttgcccccntttatttttaaaattcaaaaggccggggcttaaaaaggggccttgaaagggggcngctaacccnttcancttcccccncttcc

SEQ ID NO: 422 - DNA, 1091 bp, Homo sapiens
  misc_feature (787)..(787): n is a, c, g, or t
  misc_feature (792)..(792): n is a, c, g, or t
  misc_feature (798)..(798): n is a, c, g, or t
  misc_feature (803)..(803): n is a, c, g, or t
  misc_feature (849)..(849): n is a, c, g, or t
  misc_feature (852)..(852): n is a, c, g, or t
  misc_feature (875)..(875): n is a, c, g, or t
  misc_feature (878)..(878): n is a, c, g, or t
  misc_feature (928)..(928): n is a, c, g, or t
  misc_feature (930)..(930): n is a, c, g, or t
  misc_feature (988)..(989): n is a, c, g, or t
  misc_feature (996)..(996): n is a, c, g, or t
  misc_feature (1015)..(1015): n is a, c, g, or t
  misc_feature (1017)..(1017): n is a, c, g, or t
  misc_feature (1020)..(1020): n is a, c, g, or t
  misc_feature (1032)..(1032): n is a, c, g, or t
  misc_feature (1039)..(1039): n is a, c, g, or t
  misc_feature (1055)..(1055): n is a, c, g, or t
  misc_feature (1057)..(1057): n is a, c, g, or t
  misc_feature (1068)..(1068): n is a, c, g, or t
  misc_feature (1073)..(1073): n is a, c, g, or t
  misc_feature (1080)..(1080): n is a, c, g, or t
  misc_feature (1088)..(1088): n is a, c, g, or t
gcccacgcgtccgcggacgactagagtcgttgggcccggcgcgacccgcaggagcgtagagagcgcgggactagagtgcagagctccgggacgtggatcggagccggcgcgatgggcggagagcaggaggaggagcggttcgacggcatgttgctggccatggctcagcagcacgagggcggcgtgcaggagcttgtgaacaccttcttcagcttccttcgacgcaaaacagactttttcattggaggagaagaagggatggcagagaagcttatcacacagactttcagccaccacaatcagctggcacagaagacccggcgggagaagagagcccggcaggaggccgagcggcgggagaaggcggagcgggcggccagactggccaaggaagccaagtcagagacctcagggccccagatcaaggagctaactgatgaagaggcagagaggctgcagctagagattgaccagaaaaaggatgcagagaatcatgaggcccagctcaagaacggcagccttgactccccagggaagcaggatactgaggaagatgaggaggaagatgagaaggacaaaggaaaactgaagcccaacctaggcaacggggcagacctgcccaattaccgctggacccagaccctgtcggagctggacctggcggtccctttctgtgtgaacttccggctgaaagggaaggacatggtggtggacatccagcggcggcacctccgggtggggctcaaggggcagccagcgatcattgatggggagctctacaatgaantgaangtggangaaanctcgtggctcattgaggacggcaaggtggtgactgtgcatctgganaanatcaataaaatggagtggtgganccncttggtgtccagtgaccctgaaatcaacaccaaaaaattaaccctgaaantncaagctgtcaaactggacagtgaaactcccacctgggggaaaaatatttttgaccccnnacaaaantcctgggggctgccacttncnacnaacaaaaaaacnggaaatnctgaaaaatttttggntnaccctccgganatggntttttcnagggtaanttc

SEQ ID NO: 423 - DNA, 1046 bp, Homo sapiens
  misc_feature (845)..(845): n is a, c, g, or t
  misc_feature (874)..(874): n is a, c, g, or t
  misc_feature (889)..(889): n is a, c, g, or t
  misc_feature (892)..(892): n is a, c, g, or t
  misc_feature (917)..(917): n is a, c, g, or t
  misc_feature (933)..(933): n is a, c, g, or t
  misc_feature (951)..(951): n is a, c, g, or t
  misc_feature (974)..(974): n is a, c, g, or t
  misc_feature (986)..(986): n is a, c, g, or t
  misc_feature (1001)..(1001): n is a, c, g, or t
  misc_feature (1005)..(1005): n is a, c, g, or t
  misc_feature (1008)..(1008): n is a, c, g, or t
  misc_feature (1011)..(1011): n is a, c, g, or t
  misc_feature (1015)..(1016): n is a, c, g, or t
  misc_feature (1018)..(1018): n is a, c, g, or t
  misc_feature (1022)..(1022): n is a, c, g, or t
  misc_feature (1024)..(1025): n is a, c, g, or t
  misc_feature (1029)..(1029): n is a, c, g, or t
  misc_feature (1036)..(1036): n is a, c, g, or t
ggttatcatcaacaagaccagcagcaccagaattcagtttgctcccaggaaagcctttttgtggaaaacagtaggctcttggaagacagtaacatatgcaatgagacctataagaaaagacagctctttcggggcaacagagatggctcagggagaacatctgggagtcgacagagcagctcagaaaatgaactcaagtggtctgaccaccaaagggcctggagcagcacagactccgacagttccaaccgcaatctaaagcccgccatgaccaagacggcgagttttgggggcatcacggtgctgaccaggggtgacagcacttccagtactaggagtaccgggaagctgtccaaagcaggttccgagtcttccagcagtgcaggctcctcaggatcgctgtcccgcacccatccacctctccagagcacacccctagtctcaggtgtggcagctggctctccaggctgtgtgccttatccagagaatggaatagggggccaggttgctcccagcagcaccagctacatcctccttccacttgaagctgcaacaggcatcccgcctggaagcatccttcttaatccacacacaggccagccctttgtgaatcccgatggaactcctgcaatatacaacccacccaccagtcagcagcccctgcgaagcgccatggtggggcagtcccaacagcagccaccacagcagcagccctccccgcagccccaacagcaggtccagccaccgcagccacagatggcaggccctctggtcactcagtctgtccaggggctgcaggcttcctcccagtcagtgcaatatccagcagtctcttttcctccccnagcacctcctacctgtgtctccaacgcancacttttcccatganaanatgatgtggcaacccagtttgggcnaaatgaccctgaaccnggcagtccctcggggganaactcctgaacccccatcagggnctggtctacccnatcctccctttggcnaaanccnggnccannancccnanntttngtaatcnccttttaaag

SEQ ID NO: 424 - DNA, 1125 bp, Homo sapiens
  misc_feature (837)..(837): n is a, c, g, or t
  misc_feature (840)..(840): n is a, c, g, or t
  misc_feature (898)..(898): n is a, c, g, or t
  misc_feature (906)..(906): n is a, c, g, or t
  misc_feature (915)..(915): n is a, c, g, or t
  misc_feature (919)..(919): n is a, c, g, or t
  misc_feature (924)..(924): n is a, c, g, or t
  misc_feature (927)..(927): n is a, c, g, or t
  misc_feature (932)..(932): n is a, c, g, or t
  misc_feature (943)..(943): n is a, c, g, or t
  misc_feature (945)..(945): n is a, c, g, or t
  misc_feature (959)..(959): n is a, c, g, or t
  misc_feature (962)..(962): n is a, c, g, or t
  misc_feature (968)..(968): n is a, c, g, or t
  misc_feature (983)..(983): n is a, c, g, or t
  misc_feature (991)..(991): n is a, c, g, or t
  misc_feature (997)..(997): n is a, c, g, or t
  misc_feature (1010)..(1011): n is a, c, g, or t
  misc_feature (1020)..(1020): n is a, c, g, or t
  misc_feature (1033)..(1033): n is a, c, g, or t
  misc_feature (1037)..(1037): n is a, c, g, or t
  misc_feature (1045)..(1045): n is a, c, g, or t
  misc_feature (1047)..(1047): n is a, c, g, or t
  misc_feature (1050)..(1051): n is a, c, g, or t
  misc_feature (1054)..(1054): n is a, c, g, or t
  misc_feature (1061)..(1061): n is a, c, g, or t
  misc_feature (1071)..(1071): n is a, c, g, or t
  misc_feature (1074)..(1074): n is a, c, g, or t
  misc_feature (1081)..(1081): n is a, c, g, or t
  misc_feature (1091)..(1091): n is a, c, g, or t
  misc_feature (1097)..(1097): n is a, c, g, or t
  misc_feature (1106)..(1106): n is a, c, g, or t
  misc_feature (1117)..(1117): n is a, c, g, or t
  misc_feature (1119)..(1119): n is a, c, g, or t
  misc_feature (1122)..(1122): n is a, c, g, or t
  misc_feature (1125)..(1125): n is a, c, g, or t
gcttttagcaccagtgtgggaaatgaggacgccaggacagcctggcccgaattacaacagagccatgctgttaatcagctcaaagatttgttgcgccaacaagcagataaggaaagtgaagtatctccgtcaagaagaagaaaaatgtcccccttgaggtcattagaacatgaggaaaccaatatgcctactatgcacgaccttgttcatactattaatgaccagtctcaatatattcatcatttagaggcagaagttaagttctgcaaggaggaactctctggaatgaaaaataaaatacaagtagttgtgcttgaaaacgaagggctccagcaacagctaaaatctcaaagacaagaggagacactgagggaacaaacacttctggatgcatccggaaacatgcacaattcttggattacaacaggtgaagattctggggtgggcgaaacctccaaaagaccattttcccatgacaatgcagattttggcaaagctgcatctgctggtgagcagctagaactggagaagctaaaacttacttatgaggaaaagtgtgaaattgaggaatcccaattgaagtttttgaggaacgacttagctgaatatcagagaacttgtgaagatcttaaagagcaactaaagcataaagaatttcttctggctgctaatacttgtaaccgtgttggtggtctttgtttgaaatgtgctcagcatgaagctgttctttcccaaacccatactaatgttcatatgcagaccatcgaaagactggttaaagaaagagatgacttgatgtctgcactagtttccgtaaggagcagcttggcagatacncancaaagagaagcaagtgcttatgaacaggtgaaacaagttttgcaaatatctgaggaanccattttngaaaaaccnagcnccctnccnaatanccaaacgtaancnatggaattgatggnaancacccnaattgacggaatcantctaatgntcctcnctgacaaatgggnnaagaaaaanggggaacatggancccngggaaaantngcnnccntaaaaanaaggaatccnatnttttgcnggaacatgcntggganccggaaacngttttcctttncnaantan

SEQ ID NO: 425 - DNA, 1085 bp, Homo sapiens
  misc_feature (7)..(7): n is a, c, g, or t
  misc_feature (10)..(10): n is a, c, g, or t
  misc_feature (33)..(34): n is a, c, g, or t
  misc_feature (57)..(57): n is a, c, g, or t
  misc_feature (70)..(70): n is a, c, g, or t
  misc_feature (72)..(72): n is a, c, g, or t
  misc_feature (78)..(78): n is a, c, g, or t
  misc_feature (93)..(93): n is a, c, g, or t
  misc_feature (95)..(95): n is a, c, g, or t
  misc_feature (99)..(99): n is a, c, g, or t
  misc_feature (102)..(103): n is a, c, g, or t
  misc_feature (119)..(119): n is a, c, g, or t
  misc_feature (156)..(156): n is a, c, g, or t
  misc_feature (170)..(170): n is a, c, g, or t
  misc_feature (175)..(175): n is a, c, g, or t
  misc_feature (180)..(180): n is a, c, g, or t
  misc_feature (182)..(182): n is a, c, g, or t
  misc_feature (188)..(188): n is a, c, g, or t
  misc_feature (224)..(224): n is a, c, g, or t
  misc_feature (240)..(240): n is a, c, g, or t
  misc_feature (242)..(242): n is a, c, g, or t
  misc_feature (385)..(385): n is a, c, g, or t
  misc_feature (810)..(810): n is a, c, g, or t
  misc_feature (864)..(864): n is a, c, g, or t
  misc_feature (866)..(866): n is a, c, g, or t
  misc_feature (878)..(878): n is a, c, g, or t
  misc_feature (883)..(883): n is a, c, g, or t
  misc_feature (886)..(886): n is a, c, g, or t
  misc_feature (894)..(894): n is a, c, g, or t
  misc_feature (913)..(913): n is a, c, g, or t
  misc_feature (924)..(924): n is a, c, g, or t
  misc_feature (936)..(936): n is a, c, g, or t
  misc_feature (953)..(953): n is a, c, g, or t
  misc_feature (963)..(963): n is a, c, g, or t
  misc_feature (981)..(981): n is a, c, g, or t
  misc_feature (984)..(984): n is a, c, g, or t
  misc_feature (986)..(986): n is a, c, g, or t
  misc_feature (989)..(989): n is a, c, g, or t
  misc_feature (997)..(997): n is a, c, g, or t
  misc_feature (1002)..(1002): n is a, c, g, or t
  misc_feature (1009)..(1009): n is a, c, g, or t
  misc_feature (1013)..(1013): n is a, c, g, or t
  misc_feature (1027)..(1027): n is a, c, g, or t
  misc_feature (1032)..(1033): n is a, c, g, or t
  misc_feature (1035)..(1035): n is a, c, g, or t
  misc_feature (1048)..(1048): n is a, c, g, or t
  misc_feature (1052)..(1052): n is a, c, g, or t
  misc_feature (1056)..(1056): n is a, c, g, or t
  misc_feature (1066)..(1066): n is a, c, g, or t
  misc_feature (1070)..(1070): n is a, c, g, or t
  misc_feature (1073)..(1073): n is a, c, g, or t
  misc_feature (1079)..(1079): n is a, c, g, or t
  misc_feature (1081)..(1081): n is a, c, g, or t
gggcaanccnaggtgcggagtcgacttgcggannctgatgccccgtctttctcacanggtttcttatcancntgccgncgctgtccccggggnantagnagnntcctgacaggccgcgnctgtctgtgtgtccttctgactgtcataggaacggtnagaccccgcgggcnggagnagaangnggccanggcagaaagcggcggcaggagaagcaggcagggggncggaggacgcagaccnanacccgaggcggaggcggaccgcgagccggccatgtcggtggtggggttggacgtgggctcgcagagctgctacatcgcggtagcccgggccgggggcatcgagaccatcgccaatgagttcagcgaccggtgcaccccgtcantcatatcatttggatcaaaaaatagaacaatcggagttgcagccaaaaatcagcaaatcactcatgcaaacaatacggtgtctaacttcaaaagatttcatggccgagcattcaatgaccccttcattcaaaaggagaaggaaaacttgagttacgatttggttccattgaaaaatggtggagttggaataaaggtaatgtacatgggtgaagaacatctatttagtgtggagcagataacagccatgttgttgactaagctgaaggaaactgctgaaaacagcctcaagaaaccagtaacagattgtgttatttcagtcccctccttctttacagatgctgagaggcgatctgtgttagatgctgcacagattgttggcctaaactgtttaagacttatgaatgacatgacagctgttgctttnaattacggaatttataagcaggatctcccaagcctggatgaaaaaacctcgganantggttttttttngaatnggnaaattcancttttcaagtgtctgcttngtgcttttaanaagggaaaattnaaggtactgggaaacancttttgttcntttttaagaagaaaaaanttncnatnaaaattantgaanatttttntgcnaaatttaaactaantaaanntnggatgcaaatccnaaanacanccttcttacntttnttncggaantnaaaa

SEQ ID NO: 426 - DNA, 1081 bp, Homo sapiens
  misc_feature (781)..(781): n is a, c, g, or t
  misc_feature (853)..(853): n is a, c, g, or t
  misc_feature (861)..(861): n is a, c, g, or t
  misc_feature (864)..(864): n is a, c, g, or t
  misc_feature (870)..(870): n is a, c, g, or t
  misc_feature (874)..(874): n is a, c, g, or t
  misc_feature (891)..(891): n is a, c, g, or t
  misc_feature (904)..(904): n is a, c, g, or t
  misc_feature (923)..(923): n is a, c, g, or t
  misc_feature (926)..(926): n is a, c, g, or t
  misc_feature (940)..(940): n is a, c, g, or t
  misc_feature (948)..(948): n is a, c, g, or t
  misc_feature (950)..(950): n is a, c, g, or t
  misc_feature (952)..(952): n is a, c, g, or t
  misc_feature (966)..(966): n is a, c, g, or t
  misc_feature (968)..(968): n is a, c, g, or t
  misc_feature (972)..(972): n is a, c, g, or t
  misc_feature (986)..(986): n is a, c, g, or t
  misc_feature (993)..(993): n is a, c, g, or t
  misc_feature (996)..(996): n is a, c, g, or t
  misc_feature (999)..(999): n is a, c, g, or t
  misc_feature (1007)..(1007): n is a, c, g, or t
  misc_feature (1021)..(1021): n is a, c, g, or t
  misc_feature (1023)..(1023): n is a, c, g, or t
  misc_feature (1026)..(1026): n is a, c, g, or t
  misc_feature (1028)..(1028): n is a, c, g, or t
  misc_feature (1033)..(1033): n is a, c, g, or t
  misc_feature (1040)..(1040): n is a, c, g, or t
  misc_feature (1050)..(1050): n is a, c, g, or t
  misc_feature (1052)..(1052): n is a, c, g, or t
  misc_feature (1057)..(1057): n is a, c, g, or t
  misc_feature (1067)..(1068): n is a, c, g, or t
  misc_feature (1070)..(1070): n is a, c, g, or t
  misc_feature (1077)..(1077): n is a, c, g, or t
ggcgcggcccaacctttactccagagatcatggctgccgaggatgtggtggcgactggcgccgacccaagcgatctggagagcggcgggctgctgcatgagattttcacgtcgccgctcaacctgctgctgcttggcctctgcatcttcctgctctacaagatcgtgcgcggggaccagccggcggccagcggcgacagcgacgacgacgagccgccccctctgccccgcctcaagcggcgcgacttcacccccgccgagctgcggcgcttcgacggcgtccaggacccgcgcatactcatggccatcaacggcaaggtgttcgatgtgaccaaaggccgcaaattctacgggcccgaggggccgtatggggtctttgctggaagagatgcatccaggggccttgccacattttgcctggataaggaagcactgaaggatgagtacgatgacctttctgacctcactgctgcccagcaggagactctgagtgactgggagtctcagttcactttcaagtatcatcacgtgggcaaactgctgaaggagggggaggagcccactgtgtactcagatgaggaagaaccaaaagatgagagtgcccggaaaaatgattaaagcattcagtggaagtatatctatttttgtattttgcaaaatcatttgtaacagtccactctgtctttaaaacatagtgattacaatatttagaaagttttgagcacttgctataagttttttaattaacatcactagtgacactaataaaattaacttcttanaatgcatgatgtgtttgtgtgtcacaaatccagaaagtgaactgcagtgctgtaatacacatgttaaaaacngtttttcntcnatctgnagtnagtacaggatgaatttnaatgtgtttttcntgaaaaaaaagaaaaattnggntatttcccaaaaanggtaaaantntnaatgggccccaaananaagnatcacttttatccngaggttntgnaanaaaaaaancccctttttttttncnatngnttaanggggganttttgttttntnacccntaaaaaaaanngngggttcnaaaa

SEQ ID NO: 427 - DNA, 1162 bp, Homo sapiens
  misc_feature (703)..(703): n is a, c, g, or t
  misc_feature (737)..(737): n is a, c, g, or t
  misc_feature (750)..(750): n is a, c, g, or t
  misc_feature (759)..(759): n is a, c, g, or t
  misc_feature (772)..(772): n is a, c, g, or t
  misc_feature (777)..(777): n is a, c, g, or t
  misc_feature (824)..(824): n is a, c, g, or t
  misc_feature (836)..(836): n is a, c, g, or t
  misc_feature (838)..(838): n is a, c, g, or t
  misc_feature (849)..(849): n is a, c, g, or t
  misc_feature (872)..(872): n is a, c, g, or t
  misc_feature (886)..(886): n is a, c, g, or t
  misc_feature (897)..(897): n is a, c, g, or t
  misc_feature (903)..(903): n is a, c, g, or t
  misc_feature (914)..(914): n is a, c, g, or t
  misc_feature (916)..(916): n is a, c, g, or t
  misc_feature (922)..(923): n is a, c, g, or t
  misc_feature (928)..(928): n is a, c, g, or t
  misc_feature (930)..(930): n is a, c, g, or t
  misc_feature (934)..(934): n is a, c, g, or t
  misc_feature (940)..(941): n is a, c, g, or t
  misc_feature (947)..(947): n is a, c, g, or t
  misc_feature (951)..(951): n is a, c, g, or t
  misc_feature (958)..(958): n is a, c, g, or t
  misc_feature (966)..(966): n is a, c, g, or t
  misc_feature (974)..(974): n is a, c, g, or t
  misc_feature (989)..(989): n is a, c, g, or t
  misc_feature (1005)..(1005): n is a, c, g, or t
  misc_feature (1009)..(1009): n is a, c, g, or t
  misc_feature (1013)..(1013): n is a, c, g, or t
  misc_feature (1043)..(1043): n is a, c, g, or t
  misc_feature (1055)..(1055): n is a, c, g, or t
  misc_feature (1064)..(1064): n is a, c, g, or t
  misc_feature (1079)..(1079): n is a, c, g, or t
  misc_feature (1081)..(1081): n is a, c, g, or t
  misc_feature (1088)..(1088): n is a, c, g, or t
  misc_feature (1094)..(1094): n is a, c, g, or t
  misc_feature (1117)..(1119): n is a, c, g, or t
  misc_feature (1136)..(1136): n is a, c, g, or t
  misc_feature (1141)..(1141): n is a, c, g, or t
  misc_feature (1144)..(1144): n is a, c, g, or t
  misc_feature (1153)..(1153): n is a, c, g, or t
  misc_feature (1157)..(1157): n is a, c, g, or t
gtgacggacgaggaggagcggcacagcgccgagagcagcacgagcgaggacaactcgcccgagcacccgtacctcccgctcgtcaccgacgaggacagctggtacagcaagtggcacaagatggagcagaagttccgcatcgtctacgcgcagaagggctacctggaggagctggtgcgtctgcgcgagtcgcagctgaaggacctggaggcggagaaccggcggcttcagctgcagctggaggaggcggcggcgcagaaccagcgcgagaaacgggagctggaaggcgtgatcctggagctgcaggagcagctgacaggtctgatccccagtgaccacgcccctctggcccagggttccaaggagctcactacacccctggtcaatcaatggccctcactgggaacgcttaatggggccgagggcgccagcaactccaagctctaccggagacacagcttcatgagcacggagccgctgtcagctgaagccagtctgagctcggactcccagcgcctgggagagggcacgcgggacgaggagccctggggtcccatcgggaaggaccccacgccctccatgctgggcctctgcggctccctggcctccattcccagctgcaagtccctggcgagcttcaaatccaacgagtgcctggtgagcgacagtcccgagggcagcccagcactgagccccagctgangaacagcatgggcagtgccagccccacctgccangggcccatggaanacctgccancttttttttcaanaaganttcccccaattccaggctaccccttccaaaagaacgctacccaaccnagccaggggttntnttcggggaaanatctcgtctggctcaccttaacntttctgcctttggnaagcaccggcntgcggnaaaaaaaaacncncttggnncaagnangcangggttnncccaanccanaaggaancccccctngggggaanccttgtttccatttntttctggtggaacttngggntttncttttaattttttttccccttgcccccttnaagaaatggggngggcccaanttttcaaaacccccncnttccaantttttnaaccctctccattttttttggtnnnggcctgaaaattatttnttttnttnaacccccangggnaaaaa

SEQ ID NO: 428 - DNA, 1017 bp, Homo sapiens
  misc_feature (548)..(548): n is a, c, g, or t
  misc_feature (762)..(762): n is a, c, g, or t
  misc_feature (798)..(798): n is a, c, g, or t
  misc_feature (873)..(873): n is a, c, g, or t
  misc_feature (885)..(885): n is a, c, g, or t
  misc_feature (928)..(928): n is a, c, g, or t
  misc_feature (931)..(931): n is a, c, g, or t
  misc_feature (938)..(938): n is a, c, g, or t
  misc_feature (958)..(958): n is a, c, g, or t
  misc_feature (960)..(960): n is a, c, g, or t
  misc_feature (965)..(965): n is a, c, g, or t
  misc_feature (972)..(972): n is a, c, g, or t
  misc_feature (975)..(975): n is a, c, g, or t
  misc_feature (981)..(981): n is a, c, g, or t
  misc_feature (983)..(983): n is a, c, g, or t
  misc_feature (990)..(990): n is a, c, g, or t
  misc_feature (997)..(999): n is a, c, g, or t
  misc_feature (1001)..(1002): n is a, c, g, or t
  misc_feature (1006)..(1006): n is a, c, g, or t
  misc_feature (1011)..(1011): n is a, c, g, or t
ggggaggcacctgccacccaggcctcatctactactcagctgactgatacccaggttctggcagctgaaaacaagagtctagcagctgacaccaagaaacagaatgctgacccgcaggctgtgacaatgcctgccactgagaccaaaaaggtcagccatgtggctgatacaaaggtcaatacaaaggctcaggagactgaggctgcaccctctcaggccccagcagatgaacctgagcctgagagtgcagctgcccagtctcaggagaatcaggatactcggcccaaggtcaaagccaagaaagcccgaaaggtgaagcatctggatggggaagaggatggcagcagtgatcagagtcaggcttctggaaccacaggtggccgaagggtctcaaaggccctaatggcctcaatggcccgcagggcttcaaggggtcccatagccttttgggcccgcagggcatcaaggactcggttggctgcttgggcccggagagccttgctctccctgagatcacctaaagcccgtaggggcaaggctcgccgtanagctgccaagctccagtcatcccaagagcctgaagcaccaccacctcgggatgtggcccttttgcaagggagggcaaatgatttggtgaagtaccttttggctaaagaccagacgaagattcccatcaagcgctcggacatgctgaaggacatcatcaaagaatacactgatgtgtaccccgaaatcattgaacgagcaggctattccttgganaaggtatttgggattcaattgaaggaaattgataanaatgaccacttgtacattcttctcagcaccttaaagcccactgatgcaggcatactgggaacgactaaggactcncccaagctgggntctgctcatggtgcttcttaacatcatcttcatgaatggaaantcngttccantgaggctgttcatctgggangnccctnccccaanttnggggcntnccccccngggaaannntnntttncctcntttggg

SEQ ID NO: 429 - DNA, 886 bp, Homo sapiens
gttgagagcttgggctcctccgtgagccgccggcgcgcttcgctgcctggcggcctttccccgagccgagcccgcttcccaaggccgccagtcgtcgcctgcccgcgcctgcgcagcgtcccgggccgagagggccacggcggcggccatggcgcaccgctgtttgcggctgtggggccggggcggctgctggccccgcggcctacagcagctcctcgtgcctggcggcgtgggcccgggcgagcagccctgcctccggacgctttaccgatttgttacaactcaagcaagggccagcagaaattctcttttgacagatataattgctgcttatcaaagattctgttctcgacccccaaaaggatttgaaaaatactttcctaatggaaaaaatggaaaaaaagctagtgaacctaaagaagttatgggagagaaaaaagaatcaaagccagctgctaccacacgctcttctggaggaggaggtggtggcggtggaaaacgaggtggcaagaaagatgattctcactggtggtccaggtttcagaagggtgacattccatgggacgacaaggatttcaggatgttcttcctctggactgctctgttctggggtggagtcatgttttacttgctgctcaagagatccgggagagaaatcacttggaaggactttgtcaataactatctttcaaaaggagtagtagacagattggaagtcgtcaacaagcgttttgttcgagtgacctttacaccaggaaaaactcctgttgatgggcaatacgtttggtttaatattggcagtgtggacacctttgaacggaatctggaaactttacagcaggaattgggcatagaaggagaaaatcgggtgcctgttgtctacatt

SEQ ID NO: 430 - DNA, 904 bp, Homo sapiens
  misc_feature (779)..(779): n is a, c, g, or t
  misc_feature (817)..(817): n is a, c, g, or t
  misc_feature (838)..(838): n is a, c, g, or t
  misc_feature (851)..(851): n is a, c, g, or t
  misc_feature (863)..(863): n is a, c, g, or t
  misc_feature (877)..(880): n is a, c, g, or t
  misc_feature (888)..(888): n is a, c, g, or t
  misc_feature (894)..(894): n is a, c, g, or t
  misc_feature (896)..(904): n is a, c, g, or t
ggggaaatgcacgtccacttcaaagtccacggcacagggaagaagaacctccatggagacggcatcgccttgtggtacacccgggaccgcctcgtgccagggcctgtgtttggaagcaaagataacttccacggcttagccatcttcctggacacctaccccaatgatgagaccactgagcgcgtgttcccgtacatctcggtgatggtgaacaatggctccctgtcctacgaccacagcaaggatgggcgctggaccgagctggcgggctgcacggctgacttccgcaaccgcgatcacgacaccttcctggctgtgcgctactcccggggccgtctgacggtgatgaccgacctggaggacaagaacgagtggaagaactgcattgacatcacgggagtgcgcctgcccaccggctactacttcggggcctccgccggcaccggcgacctgtctgacaatcatgacatcatctccatgaagctgttccagctgatggtggagcacacgcccgacgaggagagcatcgactggaccaagatcgagcccagcgtcaacttcctcaagtcgcccaaagacaacgtggacgaccccacggggaacttccgcagcgggcccctgacggggtggcgggtgttcctgctgctgctgtgcgctctcctgggcatcgttgtctgcgccgtggtgggggccgtggtgttccaaaagcggcaggagcggaacaagcgcttctactgagtgggcgcctccgggcggggcctgtccctggggcccagganccaatgtgaacttttttttttaccggggattataaaangaaacaccaagaatgaccttntttttttaactgntttcaaataaantgattaaggttttnnnnaaaaaaanaaaaanannnnnnnnn

SEQ ID NO: 431 - DNA, 1129 bp, Homo sapiens
  misc_feature (349)..(349): n is a, c, g, or t
  misc_feature (666)..(666): n is a, c, g, or t
  misc_feature (746)..(746): n is a, c, g, or t
  misc_feature (769)..(769): n is a, c, g, or t
  misc_feature (790)..(790): n is a, c, g, or t
  misc_feature (823)..(823): n is a, c, g, or t
  misc_feature (861)..(861): n is a, c, g, or t
  misc_feature (865)..(865): n is a, c, g, or t
  misc_feature (895)..(895): n is a, c, g, or t
  misc_feature (897)..(897): n is a, c, g, or t
  misc_feature (902)..(902): n is a, c, g, or t
  misc_feature (904)..(904): n is a, c, g, or t
  misc_feature (914)..(915): n is a, c, g, or t
  misc_feature (936)..(937): n is a, c, g, or t
  misc_feature (939)..(939): n is a, c, g, or t
  misc_feature (952)..(952): n is a, c, g, or t
  misc_feature (954)..(954): n is a, c, g, or t
  misc_feature (962)..(963): n is a, c, g, or t
  misc_feature (967)..(967): n is a, c, g, or t
  misc_feature (980)..(980): n is a, c, g, or t
  misc_feature (986)..(986): n is a, c, g, or t
  misc_feature (988)..(988): n is a, c, g, or t
  misc_feature (990)..(990): n is a, c, g, or t
  misc_feature (992)..(992): n is a, c, g, or t
  misc_feature (1002)..(1002): n is a, c, g, or t
  misc_feature (1004)..(1004): n is a, c, g, or t
  misc_feature (1008)..(1008): n is a, c, g, or t
  misc_feature (1019)..(1019): n is a, c, g, or t
  misc_feature (1026)..(1026): n is a, c, g, or t
  misc_feature (1037)..(1037): n is a, c, g, or t
  misc_feature (1043)..(1043): n is a, c, g, or t
  misc_feature (1058)..(1059): n is a, c, g, or t
  misc_feature (1063)..(1063): n is a, c, g, or t
  misc_feature (1080)..(1080): n is a, c, g, or t
  misc_feature (1087)..(1089): n is a, c, g, or t
  misc_feature (1101)..(1101): n is a, c, g, or t
  misc_feature (1107)..(1107): n is a, c, g, or t
  misc_feature (1117)..(1117): n is a, c, g, or t
  misc_feature (1120)..(1120): n is a, c, g, or t
  misc_feature (1124)..(1124): n is a, c, g, or t
  misc_feature (1129)..(1129): n is a, c, g, or t
gcccacgcgatccgcccacgcgtccgcccggcgatatggctgccgctgtgccccgcgccgcatttctctccccgctgcttccccttctcctgggcttcctgctcctctccgctccgcatggcggcagcggcctgcacaccaagggcgcccttcccctggatacggtcactttctacaaggtcattcccaaaagcaagttcgtcttggtgaagttcgacacccagtacccctacggtgagaagcaggatgagttcaagcgtcttgctgaaaactcggcttccagcgatgatctcttggtggcagaggtggggatctcagattatggtgacaagctgaacatggagctgantgagaaatacaagctggacaaagagagctacccagtcttctacctcttccgggatggggactttgagaacccagtcccatacactggggcagttaaggttggagccatccagcgctggctgaaggggcaaggggtctacctaggtatgcctggttgcctgcctgtatacgacgccctggccggggagttcatcagggcctctggtgtggaggcccgccaggccctcttgaagcaggggcaagataacctctcaagtgtgaaggagactcagaagaagtgggccgagcaatacctgaagatcatggggaagatcttanaccaaggggaggacttcccagcatcagagatgacacggatcgccaggctgattgagaagaacaagatgagtgacgggaanaaggaggagctccagaagagctnaacatcctgattgccttccanaaaaagggggccgaaaaaaagaactgtaaaaangctgtctgtgattttccaggattggtgggggtagggangggnaaaattaacctgctggctgggaattccctngnggaananaagggggtanngggaaaagtggtactaacccnnantctgaaccctganangcctgganntganggctaaaatgacnatgctngnangncctaactggncngggnaaactggaaanttactcnggggggtgggnaatgancccccaaaaaaaaanngctnaaaaaggaaaaagaagnactgccnnntctttaaaaagnattccnttaattaaanttnaggnttggn

SEQ ID NO: 432 - DNA, 1007 bp, Homo sapiens
  misc_feature (726)..(726): n is a, c, g, or t
  misc_feature (737)..(737): n is a, c, g, or t
  misc_feature (787)..(787): n is a, c, g, or t
  misc_feature (804)..(804): n is a, c, g, or t
  misc_feature (830)..(830): n is a, c, g, or t
  misc_feature (846)..(846): n is a, c, g, or t
  misc_feature (848)..(848): n is a, c, g, or t
  misc_feature (855)..(855): n is a, c, g, or t
  misc_feature (865)..(865): n is a, c, g, or t
  misc_feature (886)..(886): n is a, c, g, or t
  misc_feature (895)..(896): n is a, c, g, or t
  misc_feature (901)..(901): n is a, c, g, or t
  misc_feature (908)..(908): n is a, c, g, or t
  misc_feature (910)..(910): n is a, c, g, or t
  misc_feature (915)..(915): n is a, c, g, or t
  misc_feature (922)..(922): n is a, c, g, or t
  misc_feature (927)..(928): n is a, c, g, or t
  misc_feature (939)..(939): n is a, c, g, or t
  misc_feature (942)..(942): n is a, c, g, or t
  misc_feature (957)..(957): n is a, c, g, or t
  misc_feature (962)..(962): n is a, c, g, or t
  misc_feature (964)..(964): n is a, c, g, or t
  misc_feature (966)..(966): n is a, c, g, or t
  misc_feature (973)..(973): n is a, c, g, or t
  misc_feature (978)..(978): n is a, c, g, or t
  misc_feature (990)..(991): n is a, c, g, or t
  misc_feature (998)..(998): n is a, c, g, or t
  misc_feature (1004)..(1005): n is a, c, g, or t
gtatcaacctgctggtcatctttgcccccaacatcctgggcatctttggggtcatcggtgccacatctgccccattcctcatcttcatcttccctgccatcttctacttccgaatcatgcccacggagaaggagcctgcaagatccacccccaaaatcctggccctgtgttttgctatgcttggcttcttgctgatgaccatgagcttgagcttcatcatcattgactgggcctcagggaccagccggcatggaggaaaccactagggtgaccctcatcctgttctgtctactcaccctagcagccctgcccagactcttcagcccctgctcccatccagtggccagtcgggggaggagaaagacgcgattaacactgtggcattcagccaggccccatgtcctctctgtggaaggtttttgttcaagagccaggaccaaggcccttgggccactaccctgctaggctctggagctgtagaggcttcctgaactgggagcagggtagggctgtcgccttagatcccgcccaagcccctcattccctccttgcacagatgcatacactggggcccagcagctgcctcctgaggtgacacagcctgtaggaacatacacagctgggatcagcctgcagccatcccccgaccctgctgctaggccacggtctgcgccctggggcctcatctcccccagcccacttgttttccccccttttattccctangcccttttcanactcctggggcccttggatactcttctcccatctcccttcacaggatganaccctcccataccccanaactggggccagcaggttctgctganggtggggctggtgtangnacccccnaaaaaacccntgtcctgtcccttcacagtcnggggaaggnnggaantcccccngncaaancctgggncaaanntcaaattccantgntgggaaaaaaaaaanggccnangnccaaaangggcntgcccccggganncaaaaanccccanngg

SEQ ID NO: 433 - DNA, 1113 bp, Homo sapiens
  misc_feature (820)..(820): n is a, c, g, or t
  misc_feature (857)..(857): n is a, c, g, or t
  misc_feature (864)..(864): n is a, c, g, or t
  misc_feature (888)..(888): n is a, c, g, or t
  misc_feature (897)..(897): n is a, c, g, or t
  misc_feature (927)..(927): n is a, c, g, or t
  misc_feature (934)..(934): n is a, c, g, or t
  misc_feature (952)..(952): n is a, c, g, or t
  misc_feature (977)..(978): n is a, c, g, or t
  misc_feature (985)..(985): n is a, c, g, or t
  misc_feature (988)..(988): n is a, c, g, or t
  misc_feature (990)..(990): n is a, c, g, or t
  misc_feature (992)..(992): n is a, c, g, or t
  misc_feature (1006)..(1006): n is a, c, g, or t
  misc_feature (1008)..(1008): n is a, c, g, or t
  misc_feature (1014)..(1014): n is a, c, g, or t
  misc_feature (1022)..(1023): n is a, c, g, or t
  misc_feature (1030)..(1030): n is a, c, g, or t
  misc_feature (1041)..(1041): n is a, c, g, or t
  misc_feature (1044)..(1044): n is a, c, g, or t
  misc_feature (1046)..(1046): n is a, c, g, or t
  misc_feature (1051)..(1051): n is a, c, g, or t
  misc_feature (1053)..(1053): n is a, c, g, or t
  misc_feature (1058)..(1058): n is a, c, g, or t
  misc_feature (1066)..(1068): n is a, c, g, or t
  misc_feature (1084)..(1084): n is a, c, g, or t
  misc_feature (1095)..(1096): n is a, c, g, or t
  misc_feature (1098)..(1098): n is a, c, g, or t
  misc_feature (1104)..(1104): n is a, c, g, or t
  misc_feature (1110)..(1110): n is a, c, g, or t
gacttggagaaatcctgtgtttcagtggaatgggcagaaggaggtgccacaaagggcaaagagattgattttgatgatgtggctgcaataaacccagaactcttacagcttcttcccttacatccgaaggacaatctgcccttgcaggaaaatgtaacaatccagaaacaaaaacggagatccgtcaactccaaaattcctgctccaaaagaaagtcttcgaagccgctccactcgcatgtccactgtctcagagcttcgcatcacggctcaggagaatgacatggaggtggagctgcctgcagctgcaaactcccgcaagcagttttcagttcctcctgcccccactaggccttcctgccctgcagtggctgaaataccattgaggatggtcagcgaggagatggaagagcaagtccattccatccgaggcagctcttctgcaaaccctgtgaactcagttcggaggaaatcatgtcttgtgaaggaagtggaaaaaatgaagaacaagcgagaagagaagaaggcccagaactctgaaatgagaatgaagagagctcaggagtatgacagtagttttccaaactgggaatttgcccgaatgattaaagaatttcgggctactttggaatgtcatccacttactatgactgatcctatcgaaagagcacagaatatgtgtctgtgttaggaaacgcccactgaataagcaagaattggccaagaaagaaattgatgtgatttccattcctagcaagtgtctcctcttggtacatgaacccaagttgaaagtggacttaacaaagtatctgggagaaccnaagcattctgcttttgactttgcatttgatgaaacangcttccnaatgaagttgtctacaaggtttcncagcaaggnccactggtacaaaaaaatcttttgaaaggnggaaaanccaacttgtttttgcatntggcccagaacaggaaagtggccannaacacanacntntngggcgggaaacccncnctgggnaaagcccnnaaatgcnctccaaagggnatntntgccntnggccnccccggannncttccccctgaaaaancacccctgctnncngaaatngggccngga

SEQ ID NO: 434 - DNA, 776 bp, Homo sapiens
  misc_feature (38)..(38): n is a, c, g, or t
  misc_feature (115)..(115): n is a, c, g, or t
  misc_feature (452)..(452): n is a, c, g, or t
  misc_feature (459)..(460): n is a, c, g, or t
  misc_feature (463)..(463): n is a, c, g, or t
  misc_feature (473)..(473): n is a, c, g, or t
  misc_feature (494)..(494): n is a, c, g, or t
  misc_feature (531)..(531): n is a, c, g, or t
  misc_feature (534)..(534): n is a, c, g, or t
  misc_feature (537)..(537): n is a, c, g, or t
  misc_feature (555)..(555): n is a, c, g, or t
  misc_feature (559)..(559): n is a, c, g, or t
  misc_feature (576)..(576): n is a, c, g, or t
  misc_feature (595)..(595): n is a, c, g, or t
  misc_feature (597)..(599): n is a, c, g, or t
  misc_feature (601)..(601): n is a, c, g, or t
  misc_feature (625)..(625): n is a, c, g, or t
  misc_feature (631)..(631): n is a, c, g, or t
  misc_feature (640)..(640): n is a, c, g, or t
  misc_feature (667)..(667): n is a, c, g, or t
  misc_feature (669)..(669): n is a, c, g, or t
  misc_feature (681)..(681): n is a, c, g, or t
  misc_feature (683)..(683): n is a, c, g, or t
  misc_feature (686)..(687): n is a, c, g, or t
  misc_feature (692)..(692): n is a, c, g, or t
  misc_feature (704)..(704): n is a, c, g, or t
  misc_feature (710)..(710): n is a, c, g, or t
  misc_feature (719)..(719): n is a, c, g, or t
  misc_feature (724)..(724): n is a, c, g, or t
  misc_feature (729)..(729): n is a, c, g, or t
  misc_feature (732)..(732): n is a, c, g, or t
  misc_feature (734)..(734): n is a, c, g, or t
  misc_feature (745)..(745): n is a, c, g, or t
  misc_feature (758)..(758): n is a, c, g, or t
  misc_feature (764)..(764): n is a, c, g, or t
gcgcttccgcctccagcgcgagccccgccgccgccgancatggacgaccccgactgcgactccacctgggaggaggacgaggaggatgcggaggacgcggaggacgaggactgcnaggacggcgaggccgccggcgcgagggacgcggacgcaggggacgaggacgaggagtcggaggagccgcgggcggcgcggcccagctcgttccagtccagaatgacagggtccagaaactggcgagccacgagggacatgtgtaggtatcggcacaactatccggatctggtggaacgagactgcaatggggacacgccaaacctgagtttctacagaaatgagatccgcttcctgcccaacggctgtttcattgaggacattcttcagaactggacggacaactatgacctccttgaggacaatcactcctacatccagtggctgtttcctctgcnagaaccnngantgaactggcntgccaagcccctcacgctcanggaggtcgaggtgtttaaaagctcccaggagatccangancgncttgtccgggcctacaanctcntgctgggcttctacggnattccggctggaggaaccnannnanggacacggttgggcccgatcacantaactncccaataancgcttccagaacctgaactggcgcaancncaacaaccctcngnatnnacacngccatcctcaantcactngggatgagntgggncctcnaancnacttccaaggngaccgctggtacngctttnttccttgaagaa

SEQ ID NO: 435 - DNA, 742 bp, Homo sapiens
  misc_feature (719)..(742): n is a, c, g, or t
gccgctgctgtagccggaccctttgccttcgccactgctcagcgtctgcacatccctacaatggctaaaacagcaatggcctacaaggaaaaaatgaaggagctgtccatgctgtcactgatctgctcttgcttttacccggaacctcgcaacatcaacatctatacttacgatgatatggaagtgaagcaaatcaacaaacgtgcctctggccaggcttttgagctgatcttgaagccaccatctcctatctcagaagccccacgaactttagcttctccaaagaagaaagacctgtccctggaggagatccagaagaaactggaggctgcagaggaaagaagaaagtctcaggaggcccaggtgctgaaacaattggcagagaagagggaacacgagcgagaagtccttcagaaggctttggaggagaacaacaacttcagcaagatggcggaggaaaagctgatcctgaaaatggaacaaattaaggaaaaccgtgaggctaatctagctgctattattgaacgtctgcaggaaaaggagaggcatgctgcggaggtgcgcaggaacaaggaactccaggttgaactgtctggctgaagcaagggagggtctggcacgccccaccaatagtaaatccccctgcctatattataatggatcatgcgatatcaggatggggaatgtatgacatggtttaaaaagaactcattattaannnnnnnnnnnnnnnnnnnnnnnn

SEQ ID NO: 436 - DNA, 913 bp, Homo sapiens
  misc_feature (444)..(444): n is a, c, g, or t
  misc_feature (663)..(663): n is a, c, g, or t
  misc_feature (673)..(673): n is a, c, g, or t
  misc_feature (719)..(719): n is a, c, g, or t
  misc_feature (724)..(724): n is a, c, g, or t
  misc_feature (726)..(726): n is a, c, g, or t
  misc_feature (729)..(729): n is a, c, g, or t
  misc_feature (752)..(752): n is a, c, g, or t
  misc_feature (757)..(757): n is a, c, g, or t
  misc_feature (759)..(759): n is a, c, g, or t
  misc_feature (764)..(764): n is a, c, g, or t
  misc_feature (769)..(769): n is a, c, g, or t
  misc_feature (775)..(775): n is a, c, g, or t
  misc_feature (788)..(788): n is a, c, g, or t
  misc_feature (792)..(792): n is a, c, g, or t
  misc_feature (821)..(821): n is a, c, g, or t
  misc_feature (830)..(830): n is a, c, g, or t
  misc_feature (845)..(845): n is a, c, g, or t
  misc_feature (865)..(865): n is a, c, g, or t
  misc_feature (871)..(871): n is a, c, g, or t
  misc_feature (876)..(876): n is a, c, g, or t
  misc_feature (882)..(882): n is a, c, g, or t
  misc_feature (885)..(885): n is a, c, g, or t
  misc_feature (891)..(891): n is a, c, g, or t
  misc_feature (893)..(893): n is a, c, g, or t
  misc_feature (895)..(895): n is a, c, g, or t
  misc_feature (903)..(903): n is a, c, g, or t
  misc_feature (905)..(905): n is a, c, g, or t
  misc_feature (913)..(913): n is a, c, g, or t
ggctgccgccttgtcgagctgagtccgcgctcccgcccaggcggcggccgacgcgacgccccgagcgcccggccccgccgccgcggcccggcagactgcctctgtcaccgggtccctccacccttgtctcctgtgcggccagcgtcagagccatggcgacggaggagaagaagcccgagaccgaggccgccagagcacagccaaccccttcgtcatccgccactcagagcaagcctacacctgtgaagccaaactatgctctaaagttcacccttgctggccacaccaaagcagtgtcctccgtgaaattcagcccgaatggagagtggctggcaagttcatctgctgataaacttattaaaatttggggcgcgtatgatgggaaatttgagaaaaccatatctggtcacaagctgggaatatccgatgtagcctggtcgtcanattctaaccttcttgtttctgcctcagatgacaaaaccttgaagatatgggacgtgagctcgggcaagtgtctgaaaaccctgaagggacacagtaattatgtcttttgctgcaacttcaatccccagtccaaccttattgtctcaggatcctttgacgaaagcgtgaggatatgggatgtgaaaaacagggaagtgcctcaagactttgccagctcantcggatccantctcggccgtttcattttattcgtgaatgggatccttgatagtttnaagtnanctntgatggtctctgttcgcattctnggganancggcnctcangccaantgccctgaaaaangctnatcgatgaccaaaaaccccccccgtggtntttttggtngaagtttctcccccnaacggaaaaatacaatcctnggtccnccacntttggnaanaaacantntnaaaacttntngggattan

SEQ ID NO: 437 - DNA, 1007 bp, Homo sapiens
  misc_feature (592)..(592): n is a, c, g, or t
  misc_feature (734)..(734): n is a, c, g, or t
  misc_feature (759)..(759): n is a, c, g, or t
  misc_feature (780)..(780): n is a, c, g, or t
  misc_feature (795)..(795): n is a, c, g, or t
  misc_feature (830)..(830): n is a, c, g, or t
  misc_feature (839)..(839): n is a, c, g, or t
  misc_feature (853)..(853): n is a, c, g, or t
  misc_feature (861)..(861): n is a, c, g, or t
  misc_feature (863)..(863): n is a, c, g, or t
  misc_feature (896)..(896): n is a, c, g, or t
  misc_feature (918)..(918): n is a, c, g, or t
  misc_feature (920)..(922): n is a, c, g, or t
  misc_feature (931)..(931): n is a, c, g, or t
  misc_feature (934)..(934): n is a, c, g, or t
  misc_feature (946)..(946): n is a, c, g, or t
  misc_feature (952)..(952): n is a, c, g, or t
  misc_feature (984)..(984): n is a, c, g, or t
  misc_feature (986)..(986): n is a, c, g, or t
  misc_feature (989)..(989): n is a, c, g, or t
  misc_feature (995)..(995): n is a, c, g, or t
  misc_feature (997)..(998): n is a, c, g, or t
  misc_feature (1004)..(1005): n is a, c, g, or t
gcgaacatggcgaccgcgcgcaccttcgggcccgagcgggaagccgagccggccaaggaagcgcgcgtcgtgggctcggagcttgtggacacttatacggtttacatcatccaggtcactgatggcagccatgagtggacagtaaagcaccgctacagcgacttccatgacctgcatgaaaagctcgttgcagagagaaagattgataaaaacctgcttccgcccaaaaagataattgggaaaaactcaagaagcttggtggagaagagggagaaggatctggaggtctacctccagaagctcctggctgccttccctggcgtgacccccagagtactggcccacttcttgcattttcacttctatgagataaatggcatcaccgcggcactggctgaagagctctttgagaaaggagaacagctcctgggggccggcgaggtctttgccattggacccctgcagctgtatgccgtcacggagcagctgcagcagggaaagcccacgtgcgccagtggggatgccaagaccgacctcgggcacatcctggacttcacctgtcgccttaagtaccttaaggtttctggcacanaaggaccttttgggaccagcaacattcaggagcagctcctgccgttcgacctatcaatattcaagtccctgcatcaggtggagataagtcactgtgatgctaagcacatcaaagggctggtcgcatcgaagcccacctttanccacgcttgagtgtccgcttctcanccaacctccatgaaggaagtnctttgttcctgaaancctcaaaatttgaatgagtgggaagcctgaaggcnccaaccctnaaaaaggccctgtnaactgccntncatcccccactttggcaggcatttgaccacccnttgacttgaacccccaacagcntnnnccaaaatcnacnaagtctttgaanctgatncccaaagaattgattttcctggaccttgaacncnaantgattngnnggtttnngg

SEQ ID NO: 438 - DNA, 907 bp, Homo sapiens
  misc_feature (445)..(445): n is a, c, g, or t
  misc_feature (459)..(459): n is a, c, g, or t
  misc_feature (465)..(465): n is a, c, g, or t
  misc_feature (467)..(467): n is a, c, g, or t
  misc_feature (471)..(471): n is a, c, g, or t
  misc_feature (474)..(474): n is a, c, g, or t
  misc_feature (479)..(480): n is a, c, g, or t
  misc_feature (493)..(493): n is a, c, g, or t
  misc_feature (504)..(504): n is a, c, g, or t
  misc_feature (511)..(511): n is a, c, g, or t
  misc_feature (536)..(536): n is a, c, g, or t
  misc_feature (581)..(581): n is a, c, g, or t
  misc_feature (626)..(626): n is a, c, g, or t
  misc_feature (648)..(648): n is a, c, g, or t
  misc_feature (650)..(650): n is a, c, g, or t
  misc_feature (652)..(652): n is a, c, g, or t
  misc_feature (665)..(665): n is a, c, g, or t
  misc_feature (668)..(668): n is a, c, g, or t
  misc_feature (676)..(676): n is a, c, g, or t
  misc_feature (685)..(685): n is a, c, g, or t
  misc_feature (705)..(705): n is a, c, g, or t
  misc_feature (707)..(707): n is a, c, g, or t
  misc_feature (711)..(711): n is a, c, g, or t
  misc_feature (719)..(719): n is a, c, g, or t
  misc_feature (721)..(722): n is a, c, g, or t
  misc_feature (732)..(732): n is a, c, g, or t
  misc_feature (737)..(737): n is a, c, g, or t
  misc_feature (739)..(739): n is a, c, g, or t
  misc_feature (746)..(746): n is a, c, g, or t
  misc_feature (751)..(751): n is a, c, g, or t
  misc_feature (761)..(761): n is a, c, g, or t
  misc_feature (770)..(770): n is a, c, g, or t
  misc_feature (776)..(776): n is a, c, g, or t
  misc_feature (793)..(793): n is a, c, g, or t
  misc_feature (796)..(796): n is a, c, g, or t
  misc_feature (798)..(798): n is a, c, g, or t
  misc_feature (802)..(802): n is a, c, g, or t
  misc_feature (809)..(810): n is a, c, g, or t
  misc_feature (818)..(818): n is a, c, g, or t
  misc_feature (825)..(825): n is a, c, g, or t
  misc_feature (842)..(843): n is a, c, g, or t
  misc_feature (869)..(869): n is a, c, g, or t
  misc_feature (887)..(888): n is a, c, g, or t
  misc_feature (903)..(903): n is a, c, g, or t
  misc_feature (906)..(906): n is a, c, g, or t
gcggcgttggcggcttgtgcagcaatggccaagatcaaggctcgagatcttcgcgggaagaagaaggaggagctgctgaaacagctggacgacctgaaggtggagctgtcccagctgcgcgtcgccaaagtgacaggcggtgcggcctccaagctctctaagatccgagtcgtccggaaatccattgcccgtgttctcacagttattaaccagactcagaaagaaaacctcaggaaattctacaagggcaagaagtacaagcccctggacctgcggcctaagaagacacgtgccatgcgccgccggctcaacaagcacgaggagaacctgaagaccaagaagcagcagcggaaggagcggctgtacccgctgcggaagtacgcggtcaaggcctgaggggcgcattgtcaataaagcacagctggctgagactgaaaaaaaaaanaaaaaaaaaataanaaaaananttanaanaaaannaaaagggcggccnctccctatagngagtcgnattaagcttaattagctgagcttgnactcctgttgataaatccagtaaatgacctcaaaactccatctgnatttgttcaaaacgctcggtttgccgcccgggcgttttttattgntgaaaatccaagctagctttgncnanatttttcaggganctnagggaagntaaattggnaaaaaaaaatcccctggatntncccncccgtttnannatttcccaantggcntncgtaaanaacanttttgaggcnttttcagtnccgttngcctcaatgtaccctanaancnaaanccgttcnncttggatnttaacgnccttttttaaaaaaccnnaaaaaaaaaataaaccacaatttttnttccggcctttttttccnntttttttcccccccngang

SEQ ID NO: 439 - DNA, 874 bp, Homo sapiens
  misc_feature (623)..(623): n is a, c, g, or t
  misc_feature (626)..(626): n is a, c, g, or t
  misc_feature (701)..(701): n is a, c, g, or t
  misc_feature (704)..(704): n is a, c, g, or t
  misc_feature (711)..(711): n is a, c, g, or t
  misc_feature (719)..(719): n is a, c, g, or t
  misc_feature (731)..(731): n is a, c, g, or t
  misc_feature (734)..(734): n is a, c, g, or t
  misc_feature (756)..(756): n is a, c, g, or t
  misc_feature (759)..(759): n is a, c, g, or t
  misc_feature (769)..(769): n is a, c, g, or t
  misc_feature (774)..(774): n is a, c, g, or t
  misc_feature (783)..(783): n is a, c, g, or t
  misc_feature (799)..(799): n is a, c, g, or t
  misc_feature (803)..(803): n is a, c, g, or t
  misc_feature (807)..(807): n is a, c, g, or t
  misc_feature (809)..(809): n is a, c, g, or t
  misc_feature (813)..(813): n is a, c, g, or t
  misc_feature (815)..(815): n is a, c, g, or t
  misc_feature (817)..(818): n is a, c, g, or t
  misc_feature (824)..(824): n is a, c, g, or t
  misc_feature (827)..(827): n is a, c, g, or t
  misc_feature (836)..(836): n is a, c, g, or t
  misc_feature (838)..(838): n is a, c, g, or t
  misc_feature (859)..(859): n is a, c, g, or t
  misc_feature (864)..(864): n is a, c, g, or t
  misc_feature (868)..(868): n is a, c, g, or t
  misc_feature (870)..(870): n is a, c, g, or t
gagcggcctcggaagtcccagggagtggaggcccccgccgtggagccgtgtggtgtatgtgtggtaacaccatgtctgtgcccctgctcaccgatgctgccaccgtgtctggagctgagcgggaaacggccgcggttatttttttacatggacttggagacacagggcacagctgggctgacgccctctccaccatccggctccctcacgtcaagtacatctgtccccatgcgcctaggatccctgtgaccctcaacatgaagatggtgatgccctcctggtttgacctgatggggctgagtccagatgccccagaggacgaggctggcatcaagaaggcagcagagaacatcaaggccttgattgagcatgaaatgaagaacgggatccctgccaatcgaatcgtcctgggaggcttttcacagggcggggccctgtccctctacacggccctcacctgcccccaccctctggctggcatcgtggcgttgagctgctggctgcctctgcaccgggccttcccccaggcagctaatggcagtgccaaggacctggccatactccagtgccatggggagctggaccccatggtgcccgtacggtttggggccctgacggctganaanctccggtctgttgtcacacctgccagggtccagttcaagacatacccgggtgtcatgcacagctcctgtcctcanganatggcanctgtgaangaatttcttganaanctgctgcctcctgtctaactantcnctggccccantgcantacccccanctcatgggggactcancaancaancntggnancnntcttgnatntgaaccggncnaaccccctgtccccacccttnctganctgncntttt

SEQ ID NO: 440 - DNA, 855 bp, Homo sapiens
ggcaattttgctggtgacctggtccggaacttggaaggagccaatcaacacgtttctaaggaactcctagatctggcaatgcagaatgcctggtttcggaaatctcgattcaaaggagggaaaggaaaaaagctgaacattggtggaggaggcctaggctacagggagcggcctggcctgggctctgagaacatggatcgaggaaataacaatgtaatgagcaattatgaggcctacaagccttccacaggagctatgggagatcgactaacggcaatgaaagcagctttccagtcacagtacaagagtcactttgttgcagccagtttaagtaatcagaaggctggaagttctgctgctggggcaagtgggtggactagtgcagggagcttgaattctgttccaactaactcagcacaacagggccataacagtcctgacagccccgtcaccagtgccgccaagggcatcccaggctttggcaatactggcaacatcagtggtgcccctgtgacctacccgtctgccggagcccaaggagtcaacaacacagcttcagggaataacagccgagaagggactgggggcagcaacgggaaaagagagagatatactgagaaccggggcagcagccgtcacagtcacggagagactggcaatcggcatagcgatagtccacgtcacggagatggtggtcgccatggagatggataccgccatccagaaagcagcagccgtcatactgatggccatcggcacggggagaacagacatggaggaagcgcaggccggcatgggggagaaccggggtgcaaatgatggtcggaatggggaaagcaagaagaagcttttaat

SEQ ID NO: 441 - DNA, 1048 bp, Homo sapiens
  misc_feature (767)..(767): n is a, c, g, or t
  misc_feature (821)..(821): n is a, c, g, or t
  misc_feature (837)..(837): n is a, c, g, or t
  misc_feature (847)..(847): n is a, c, g, or t
  misc_feature (852)..(852): n is a, c, g, or t
  misc_feature (858)..(858): n is a, c, g, or t
  misc_feature (872)..(872): n is a, c, g, or t
  misc_feature (888)..(888): n is a, c, g, or t
  misc_feature (898)..(898): n is a, c, g, or t
  misc_feature (906)..(906): n is a, c, g, or t
  misc_feature (908)..(908): n is a, c, g, or t
  misc_feature (914)..(914): n is a, c, g, or t
  misc_feature (917)..(917): n is a, c, g, or t
  misc_feature (919)..(919): n is a, c, g, or t
  misc_feature (921)..(921): n is a, c, g, or t
  misc_feature (924)..(926): n is a, c, g, or t
  misc_feature (949)..(950): n is a, c, g, or t
  misc_feature (952)..(952): n is a, c, g, or t
  misc_feature (954)..(954): n is a, c, g, or t
  misc_feature (957)..(957): n is a, c, g, or t
  misc_feature (966)..(966): n is a, c, g, or t
  misc_feature (974)..(974): n is a, c, g, or t
  misc_feature (976)..(977): n is a, c, g, or t
  misc_feature (997)..(997): n is a, c, g, or t
  misc_feature (1001)..(1001): n is a, c, g, or t
  misc_feature (1011)..(1011): n is a, c, g, or t
  misc_feature (1014)..(1014): n is a, c, g, or t
  misc_feature (1019)..(1019): n is a, c, g, or t
  misc_feature (1022)..(1022): n is a, c, g, or t
  misc_feature (1045)..(1045): n is a, c, g, or t
  misc_feature (1048)..(1048): n is a, c, g, or t
gtgcagccgcccgccgcatccgccgccgcagcccccagcatgtcgggcccagacgtcgagacgccgtccgccatccagatctgccggatcatgcggccagatgatgccaacgtggccggcaatgtccacggggggaccatcctgaagatgatcgaggaggcaggcgccatcatcagcacccggcattgcaacagccagaacggggagcgctgtgtggccgccctggctcgtgtcgagcgcaccgacttcctgtctcccatgtgcatcggtgaggtggcgcatgtcagcgcggagatcacctacacctccaagcactctgtggaggtgcaggtcaacgtgatgtccgaaaacatcctcacaggtgccaaaaagctgaccaataaggccaccctgtggtatgtgcccctgtcgctgaagaatgtggacaaggtcctcgaggtgcctcctgttgtgtattcccggcaggagcaggaggaggagggccggaagcggtatgaagcccagaagctggagcgcatggagaccaagtggaggaacggggacatcgtccagccagtcctcaacccagagccgaacactgtcagctacagccagtccagcttgatccacctggtggggccttcagactgcaccctgcacggctttgtgcacggaggtgtgaccatgaagctcatggatgaggtcgccgggatcgtggctgcacgccactgcaagaccaacatcgtcacagcttccgtggacgccattaattttcatgacaagatcanaaaaggctgcgtcatcaccatctcgggacgcatgaccttcacgagcaaataaantccatggaaaatcgangtgtttggtngaacncccaanccttgtttgtgganagcttttcaaaaaacngctaccgggnccgccagngncctttnttncncntannntgttcccttaaaccaagaaaggnnangntcncttgccttntgcccccnannttggtgccccaaaaaccaangaanaaaaaaaaanccnttttnaanaaggcaaaaggggggttaccttncan

SEQ ID NO: 442 - DNA, 772 bp, Homo sapiens
gcggttcccgggaggatgaagttcgtgtacaaagaagagcatccgttcgagaagcgccgctctgagggcgagaagatccgaaagaaatacccggaccgggtgccggtgatagtagaaaaggctcccaaagctcggataggagacctggacaaaaagaaatacctggtgccttctgatctcacagttggtcagttctacttcttgatccggaagcgaattcatctccgagctgaggatgccttgtttttctttgtcaacaatgtcattccacccaccagtgccacaatgggtcagctgtaccaggaacaccatgaagaagacttctttctctacattgcctacagtgacgaaagtgtctacggtctgtgaagctgctgcccctgagctggaggggggtctcattctacaaagagagaggtggcccccctttcttgacctcctcctccttcaagctcaaacaccacctcccttattcaggaccggcacttcttaatgtttgtggctttctctccagcctctcttaggaggggtaatggtggagttggcaacttgtaactctcctttctcctttcttcccctttctctgcccgcctttcccatcctgctgtagacttcttgattgtcagtctgtgtcacatccagtgattgttttggtttctgttccctttctgactgcccaaggggctcagaaaccccagcaatcccttcctttcactaccttcttttttgggggtagttggaagggactgaaattgtggggggaagggtagga

SEQ ID NO: 443 - DNA, 1053 bp, Homo sapiens
  misc_feature (782)..(782): n is a, c, g, or t
  misc_feature (869)..(869): n is a, c, g, or t
  misc_feature (884)..(884): n is a, c, g, or t
  misc_feature (895)..(895): n is a, c, g, or t
  misc_feature (906)..(906): n is a, c, g, or t
  misc_feature (926)..(926): n is a, c, g, or t
  misc_feature (928)..(928): n is a, c, g, or t
  misc_feature (931)..(931): n is a, c, g, or t
  misc_feature (939)..(939): n is a, c, g, or t
  misc_feature (951)..(951): n is a, c, g, or t
  misc_feature (956)..(956): n is a, c, g, or t
  misc_feature (963)..(963): n is a, c, g, or t
  misc_feature (966)..(966): n is a, c, g, or t
  misc_feature (983)..(984): n is a, c, g, or t
  misc_feature (991)..(991): n is a, c, g, or t
  misc_feature (993)..(993): n is a, c, g, or t
  misc_feature (995)..(995): n is a, c, g, or t
  misc_feature (998)..(998): n is a, c, g, or t
  misc_feature (1006)..(1007): n is a, c, g, or t
  misc_feature (1015)..(1015): n is a, c, g, or t
  misc_feature (1022)..(1023): n is a, c, g, or t
  misc_feature (1042)..(1042): n is a, c, g, or t
  misc_feature (1045)..(1046): n is a, c, g, or t
  misc_feature (1048)..(1048): n is a, c, g, or t
  misc_feature (1053)..(1053): n is a, c, g, or t
gccttgcacctgctgaagtgcagctttgacgtggtcaagcgctgggtgaatgaggctcaggaggcagcatccagtgataacatcatggtccagtaccacgcactagggctcctgtaccatgtgcgtaagaatgaccgcctagccgtcaataagatgatcagcaaggtcacacggcacggccttaagtctccctttgcctactgcatgatgatccgggtggccagcaagcaggtggaagaggaggatggcagccgtgacagcccactgtttgacttcatcgagagctgcttgcgcaacaagcacgagatggtggtgtatgaagccgcctcggccatcgtcaatctgccaggctgcagtgccaaagagctggccccggctgtgtcaggtcactgggcattccttcacccagcgtcacatgtttatgcttgctgggaactaggcctgggttcccgggctaggagaaagaaagaaaatgctcttaacaagtgttaaggagtctgtacctaggaagcacctgccccagacactatgctgagtccccacttgtatcacgttttggtggtgggctgctgttagttccatctgactgctgaagaggctgagtgctccagcttttctgcagctcacccaaggctgctctccgctatgctgctgttcgtaccctcaataaggttgccatgaagcatccgtcagctgtgacagcttgtaatctggatctggagaacctggtcacagattcaaaccgcagcattgccacgctggccatcaccaccctccttaanacgggcagcgagaagcagcatcgaccgcctcatgaagcaaatctcctccttcatgtcaaaaatctcggatgaattcaaggtggtggntgtccagcccatcantgccctgtgtnaaaaatatccncccaaacccccgtccttatnanttncctgttcnccatgctgcggnaaaanggtggcnttnaataaaaccccctatcnnggaacgncncntcnccttcttnnaaaaaacnccaaaannaagaaacagggttttcccnctnncnaattn

SEQ ID NO: 444 - DNA, 1072 bp, Homo sapiens
  misc_feature (778)..(778): n is a, c, g, or t
  misc_feature (795)..(795): n is a, c, g, or t
  misc_feature (838)..(838): n is a, c, g, or t
  misc_feature (841)..(841): n is a, c, g, or t
  misc_feature (863)..(863): n is a, c, g, or t
  misc_feature (877)..(877): n is a, c, g, or t
  misc_feature (889)..(889): n is a, c, g, or t
  misc_feature (891)..(891): n is a, c, g, or t
  misc_feature (895)..(895): n is a, c, g, or t
  misc_feature (909)..(909): n is a, c, g, or t
  misc_feature (912)..(912): n is a, c, g, or t
  misc_feature (942)..(942): n is a, c, g, or t
  misc_feature (946)..(946): n is a, c, g, or t
  misc_feature (963)..(963): n is a, c, g, or t
  misc_feature (966)..(966): n is a, c, g, or t
  misc_feature (980)..(980): n is a, c, g, or t
  misc_feature (1003)..(1003): n is a, c, g, or t
  misc_feature (1007)..(1007): n is a, c, g, or t
  misc_feature (1010)..(1010): n is a, c, g, or t
  misc_feature (1018)..(1018): n is a, c, g, or t
  misc_feature (1020)..(1020): n is a, c, g, or t
  misc_feature (1025)..(1025): n is a, c, g, or t
  misc_feature (1034)..(1034): n is a, c, g, or t
  misc_feature (1045)..(1045): n is a, c, g, or t
  misc_feature (1050)..(1050): n is a, c, g, or t
  misc_feature (1052)..(1052): n is a, c, g, or t
  misc_feature (1055)..(1055): n is a, c, g, or t
  misc_feature (1062)..(1062): n is a, c, g, or t
  misc_feature (1072)..(1072): n is a, c, g, or t
ggcgacggacgcaagatggcgacggcgaccatagctctccaggtcaatggccagcaaggaggggggtccgagccggcggcggcggcggcagtggtggcagcgggagacaaatggaaacctccacagggcacagactccatcaagatggagaacgggcagagcacagccgccaagctggggctgcctcccctgacgcccgagcagcaggaggcccttcagaaggccaagaagtacgccatggagcagagcatcaagagtgtgctggtgaagcagaccatcgcgcaccagcagcagcagctcaccaacctgcagatggcagcagtgacaatgggctttggagatcctctctcacctttgcaatcgatggcggctcagcggcagcgggcgctggccatcatgtgccgcgtctacgtgggctctatctactatgagctgggggaggacaccatccgccaggcctttgccccctttggccccatcaagagcatcgacatgtcctgggactccgtcaccatgaagcacaagggctttgccttcgtggagtatgaggtccccgaagctgcacagctggccttggagcagatgaactcggtgatgctggggggcaggaacatcaaggtgaggcagggagccaaggcctcgatcccgcaggcgtgcagggctgcccctccacggaagccttttgtggccgggcctgggttgaccggtctttccatctcaccgcctcttccccaggtgggcagacccagcaacatagggcaggcccagcccatcatanaccagttggctgaagangcacgggccttcaaccgcatctacgtggcctctgtgcaccagnacntctcaaacgatgacatcaagancgtgtttgaaggcntttggcaaaatnangtcntgcacactggcccnggnacccacaactggcaagcacaagggctacgncttntttgaataaaaaaaggnccnagtccttcccaaanatgctgtttcttccatgaacctntttnacntggggggncnaaaanttggggggngggcaagggtntttanancgnccaatgncccttttttn

SEQ ID NO: 445 - DNA, 717 bp, Homo sapiens
  misc_feature (313)..(313): n is a, c, g, or t
  misc_feature (419)..(419): n is a, c, g, or t
  misc_feature (546)..(546): n is a, c, g, or t
  misc_feature (556)..(556): n is a, c, g, or t
  misc_feature (577)..(577): n is a, c, g, or t
  misc_feature (624)..(624): n is a, c, g, or t
  misc_feature (631)..(631): n is a, c, g, or t
  misc_feature (633)..(633): n is a, c, g, or t
  misc_feature (635)..(635): n is a, c, g, or t
  misc_feature (640)..(641): n is a, c, g, or t
  misc_feature (653)..(653): n is a, c, g, or t
  misc_feature (658)..(658): n is a, c, g, or t
  misc_feature (662)..(662): n is a, c, g, or t
  misc_feature (665)..(665): n is a, c, g, or t
  misc_feature (673)..(673): n is a, c, g, or t
  misc_feature (680)..(680): n is a, c, g, or t
  misc_feature (685)..(687): n is a, c, g, or t
  misc_feature (703)..(703): n is a, c, g, or t
  misc_feature (706)..(706): n is a, c, g, or t
  misc_feature (708)..(708): n is a, c, g, or t
  misc_feature (714)..(715): n is a, c, g, or t
gtcttcaactccccagggagctaccgggaacccaagcaccccttgggaggccgggaagcctgtggcatggacaccctgcccctgaacggcaacttcaataacagttactccttgcgaagtggggatttccctcccggggatgggggccctgagccgccccgaggccggaacctagccgatgcggcggcctttgagaagatgatcatctcagagctggtgcacaacaacctgcgggggagcagcagcgcggccaagggccctccaccgcctgagccccctgtgccacctgtgccagggggcgggggcgaggaanaggcgggcgggcccgggggtgctgaccgggccgagattgaacttctctataaggccctggaggagcctctgctgctgccccgggcccagtcggtgctgtaccagancgatctggacgagtcggagagctgcacggccgaggacggcgccaccagccggcccctctcctcccctcctggccgggactccctctatgccagcggggccaacctgcgggactcaccctcctacccngacagcatcnctgaggggcccagtgaggccntgcccccaccccctcccgcaccccccggcccccccgaaatctactanacctcgngncnaccanncctggtgacccngaatncccntgnaaggctantaccaanttgcnnngtcctatccactaggnctnanctgaanncc

SEQ ID NO: 446 - DNA, 896 bp, Homo sapiens
  misc_feature (760)..(760): n is a, c, g, or t
  misc_feature (813)..(813): n is a, c, g, or t
  misc_feature (842)..(842): n is a, c, g, or t
  misc_feature (859)..(860): n is a, c, g, or t
  misc_feature (870)..(870): n is a, c, g, or t
  misc_feature (873)..(873): n is a, c, g, or t
  misc_feature (877)..(878): n is a, c, g, or t
  misc_feature (880)..(880): n is a, c, g, or t
  misc_feature (883)..(883): n is a, c, g, or t
  misc_feature (885)..(888): n is a, c, g, or t
  misc_feature (892)..(892): n is a, c, g, or t
gcaggcatgccaccatctttttcaaagcccaatattgaaggtgccccaggggctcatattggaaataccttccagcatgtgcagtctttgccaacaaaaaaaattaccaagaaacctattccagatgagcacctcattctaaagaccacatttgaggatcttattcagcgctgcctttcttcagcaacagaccctcaaaccaagaggaagctagatgatgccagcaaacgtttggagtttctgtatgataaacttagggaacagacactttcaccaacaatcaccagtggtttacacaacattgcaaggagcattgaaactcgaaactactcagaaggattgaccatgcatacccacatagttagcaccagcaacttcagtgagacctctgctttcatgccagttctcaaagttgttctcacccaggccaataagctgggtgtctaaaaggacagcttctcttccactcaatattgccatttttccaaagaaacatgttaaaaaaaaaaattataagacatggactagtcctcattagcatgtttgcatagcaaccagtcaagagcatttacactatttctgctgatatactcaccttagaactgctcagaaccctggtgctttatttttgttttaatcttttgttgccagtgatgattttcctattctgcaaatagtgtatttcctggattacacatagtatggttttcctgaagtattctgataaatgtgttttttaaaacctcaatatactttttanaaaaggagcatctggttatgcataaagcagagctaaaactaaatttctttcangtcctcccctacttcccccaggggtcaancagaattaaaagtgggnnaatcccttanaanaaannanaanannnnaaanaaaa

SEQ ID NO: 447 - DNA, 1088 bp, Homo sapiens
  misc_feature (798)..(798): n is a, c, g, or t
  misc_feature (836)..(836): n is a, c, g, or t
  misc_feature (911)..(911): n is a, c, g, or t
  misc_feature (914)..(914): n is a, c, g, or t
  misc_feature (932)..(932): n is a, c, g, or t
  misc_feature (936)..(936): n is a, c, g, or t
  misc_feature (954)..(954): n is a, c, g, or t
  misc_feature (963)..(963): n is a, c, g, or t
  misc_feature (965)..(965): n is a, c, g, or t
  misc_feature (968)..(968): n is a, c, g, or t
  misc_feature (978)..(978): n is a, c, g, or t
  misc_feature (986)..(986): n is a, c, g, or t
  misc_feature (990)..(991): n is a, c, g, or t
  misc_feature (1001)..(1002): n is a, c, g, or t
  misc_feature (1004)..(1004): n is a, c, g, or t
  misc_feature (1008)..(1008): n is a, c, g, or t
  misc_feature (1012)..(1012): n is a, c, g, or t
  misc_feature (1015)..(1015): n is a, c, g, or t
  misc_feature (1022)..(1022): n is a, c, g, or t
  misc_feature (1034)..(1034): n is a, c, g, or t
  misc_feature (1050)..(1050): n is a, c, g, or t
  misc_feature (1067)..(1067): n is a, c, g, or t
  misc_feature (1083)..(1083): n is a, c, g, or t
gattcattcaccatccaggcctatgattgtgggaagggacctgatggcaccaacgtgaaaaagtctcataaagcaactgttcatattcaggtgaacgacgtgaatgagtacgcgcccgtgttcaaggagaagtcctacaaagccacggtcatcgaggggaagcagtacgacagcattttgagggtggaggccgtggatgccgactgctcccctcagttcagccagatttgcagctacgaaatcatcactccagacgtgccctttactgttgacaaagatggttatataaaaaacacagagaaattaaactacgggaaagaacatcaatataagctgaccgtcactgcctatgactgtgggaagaaaagagccacagaagatgttttggtgaagatcagcattaagcccacctgcacccctgggtggcaaggatggaacaacaggattgagtatgagccgggcaccggcgcgttggccgtctttccaaatatccacctggagacatgtgacgagccagtcgcctcagtacaggccacagtggagctagaaaccagccacatagggaaaggctgcgaccgagacacctactcagagaagtccctccaccggctctgtggtgcggccgctccctatagtgagtcgtattaagcttaattagctgagcttggactcctgttgatagatccagtaatgacctcagaactccatctggatttgttcagaacgctcggttgccgccgggcgtttttttattggtgagaatccaagctagcttggcgagattttcaggagctaagnaagctaaaatggagaaaaaaatcactggatataccacngttgatatatcccaatggcatcgtaaagaacattttgaggcatttcagtcagttgctcaatgtacctataaccanacngttcagctggaaattacngccntttttaaaaaccgtaaanaaaaataancncangttttatccnggcctttnttcnnattcttgccnncntgangaangcnctcccgnaattcctatggnattgaaaaacgggganctggggaattgggaaanggttcccccttgtacncgttt

SEQ ID NO: 448 - DNA, 879 bp, Homo sapiens
gcggacgcgtgggcggcggtggagttcctgtccaaggctgtggacagtccaaacatcaaggcagtggacgaggctgtgatcttgctccaggagatcggggtgctggaccagcgggagtacctgactaccctggggcagcgcctggctcacatctccaccgacccccggttggccaaggccattgtgttggctgccatcttccgttgcctgcacccactactggtggtcgtttcctgcctcacccgggaccccttcagcagcagcctacagaaccgggcagaggtggacaaggtgaaagcactgttgagccatgacagcggcagtgaccacctggcctttgtgcgggctgtcgccggctgggaggaggtgctgcgttggcaggaccgcagctcccgggagaattacctggaggaaaacctgctgtacgcacccagcctgcgcttcatccacggactcatcaagcagttctcagagaacatttatgaggccttcctggtggggaagccctcggactgcaccctggcctccgcccagtgcaacgagtacagtgaggaggaggagctggtgaagggcgtgctgatggccggcctctaccccaacctcatccaggtgaggcagggcaaggtcacccggcaggggaagttcaagcccaacagcgtcacatataggaccaaatcaggcaacatcctgctgcacaagtcgaccattaacagggaggccacacggttacggagccgatggctgacgtatttcatggcagtcaagtccaatggcagcgtcttcgtccgggactcctctcagtgcacccgctagctgtgctgctgctgaccgacggggacgtgcacatccgtgatgacgggcgccgggccaccatctcac

SEQ ID NO: 449 - DNA, 881 bp, Homo sapiens
gggagagcccggaaccagggccggagcggcgggcggagccgagctgcggggagccgctccgggtgcccccacccccgcgcgcctcagtggtgccggccgagggcagggctcgcggttgcggggctcgcgccgctgtcagtgcggcggggcgcgcgagcggcgccagctcggggcagcggaacccagagaagctgagggggcggtagcggcggcgacggcgacgacgacgactcccgcgcgtgtgcccagcctcttcccgccgcagccgcccttttcctccctcccttacgtccccgagtgcggcagtaccgcctccttcccagccgcgcggcttcctccagacctctcggcgcgggtgagccctattcccagaggcaggtggtgctgaccctgtaacccaaaggaggaaacagctggctaagctcatcattgttactggtgggcactatgtccttgaagcttcaggcaagcaatgtaaccaacaagaatgaccccaagtccatcaactctcgagtcttcattggaaacctcaacacagctctggtgaagaaatcagatgtggagaccatcttctctaagtatggccgtgtggccggctgttctgtgcacaagggctatgcctttgttcagtactccaatgagcgccatgcccgggcagctgtgctgggagagaatgggcgggtgctggccgggcagaccctggacatcaccatggctgggagagcctaagcctgacagacccaaggggctaaagagagcagcatctgccatatacaggctcttcgactaccggggccgttggtcgcccgtgccagtgcccagggcggtccctgtgatgcgaccccgggtcacagtccctttgggtccggcgtgtcaaaact

SEQ ID NO: 450 - DNA, 1078 bp, Homo sapiens
  misc_feature (659)..(659): n is a, c, g, or t
  misc_feature (728)..(728): n is a, c, g, or t
  misc_feature (761)..(761): n is a, c, g, or t
  misc_feature (803)..(803): n is a, c, g, or t
  misc_feature (836)..(836): n is a, c, g, or t
  misc_feature (839)..(839): n is a, c, g, or t
  misc_feature (865)..(865): n is a, c, g, or t
  misc_feature (875)..(875): n is a, c, g, or t
  misc_feature (886)..(886): n is a, c, g, or t
  misc_feature (898)..(898): n is a, c, g, or t
  misc_feature (909)..(909): n is a, c, g, or t
  misc_feature (924)..(924): n is a, c, g, or t
  misc_feature (931)..(932): n is a, c, g, or t
  misc_feature (937)..(937): n is a, c, g, or t
  misc_feature (950)..(950): n is a, c, g, or t
  misc_feature (972)..(972): n is a, c, g, or t
  misc_feature (974)..(975): n is a, c, g, or t
  misc_feature (978)..(978): n is a, c, g, or t
  misc_feature (997)..(997): n is a, c, g, or t
  misc_feature (1005)..(1005): n is a, c, g, or t
  misc_feature (1008)..(1009): n is a, c, g, or t
  misc_feature (1013)..(1013): n is a, c, g, or t
  misc_feature (1017)..(1017): n is a, c, g, or t
  misc_feature (1023)..(1023): n is a, c, g, or t
  misc_feature (1028)..(1028): n is a, c, g, or t
  misc_feature (1030)..(1030): n is a, c, g, or t
  misc_feature (1038)..(1038): n is a, c, g, or t
  misc_feature (1049)..(1049): n is a, c, g, or t
  misc_feature (1052)..(1052): n is a, c, g, or t
  misc_feature (1063)..(1063): n is a, c, g, or t
  misc_feature (1070)..(1071): n is a, c, g, or t
  misc_feature (1075)..(1075): n is a, c, g, or t
  misc_feature (1078)..(1078): n is a, c, g, or t
gggcgggcacccggcggccaggagagagagggagggcgccacgcaccggactgcgggccgagagcgcgcacgccgcgctccgcccctgctgccgcccccgtcgccgccgccgccgccgccgcagcttgggaggtgctgccaccacaggtacctgcacatgttgttctttgtcagtgctggcacaagaacctcctggcagtagatgtatttcgttcacctttgtcccgggcattccaactggtggaggagatccggaaccacgtgctgagagacagctctgggatcaggagcttggaggagttgtgtctgcaagtgaccgacctgctgccaggccttaggaagctcaggaacctactccctgagcatggatgcctgctgctgtcccctgggaacttctggcagaatgactgggaacgcttccatgctgatcctgacatcattgggaccatccaccagcacgagcctaaaaccctgcagacttcagccacactcaaagacttgttatttggtgttcctgggaagtacagcggggtgagcctctacaccaggaagaggatggtctcctacaccatcaccctggtcttccagcactaccatgccaagttcctgggcagcctgcgtgcccgcctgatgcttctgcaccccagccccaactgcanccttcgggcggagagcctggtccacgtgcacttcaaggaggagattggtgtcgctgaactcatcccccnttgtgaccacctacatcatcttgtttgcctaanatctacttctccacgcggaaaatcgacatggtcaagtccaantggggggctgggcctggctgcccggggtcacantgntcaactcccttgctcatgtctgtggnaattttgcanactttttcggncttgaaccccanccttcaatggngggtaggtccctaanaggttcnntgggncaaaagggggggnttcaggccaaaaaaacccttgncnnttntgggttttgggccttcccngaatttgntgnnaccncccnttttcnatttntnttttttanatttaaaaaanaanttttcctcccntttttgnngggntgn

SEQ ID NO: 451 - DNA, 906 bp, Homo sapiens
gcccacgcgtccgggagcgacagagcgagcggcccctacggccgtcggcggcccggcggcccgagatgttatctgggaagaaggcggcagccgcggcggcggcggctgcagcggcagcaaccgggacggaggctggccctgggacagcaggcggctccgagaacgggtctgaggtggccgcgcagcccgcgggcctgtcgggcccagccgaggtcgggccgggggcggtgggggagcgcacaccccgcaagaaagagcctccgcgggcctcgccccccgggggcctggcggaaccgccggggtccgcagggcctcaggccggccctactgtcgtgcctgggtctgcgacccccatggaaactggaatagcagagactccggaggggcgtcggaccagccggcgcaagcgggcgaaggtagagtacagagagatggatgaaagcttggccaacctctcagaagatgagtattattcagaagaagagagaaatgccaaagcagagaaggaaaagaagcttcccccaccaccccctcaagccccacctgaggaagaaaatgaaagtgagcctgaagaaccatcgggtgtggagggcgcagctttccagagccgacttcctcatgaccggatgacttctcaagaagcagcctgttttccagatattatcagtggaccacaacagacccagaaggtttttcttttcattagaaaccgcacactgcagttgtggttggataatccaaagattcagctgacatttgaggctactctccaacaattagaagcaccttataacagtgatactgtgcttgtccaccgagttcacagttatttagagcgtcatggtcttatcaacttcggcatctataagaggataaaacccctaccaactaaaaagacaggaaagg

SEQ ID NO: 452 - DNA, 1279 bp, Homo sapiens
  misc_feature (792)..(792): n is a, c, g, or t
  misc_feature (821)..(821): n is a, c, g, or t
  misc_feature (860)..(860): n is a, c, g, or t
  misc_feature (862)..(862): n is a, c, g, or t
  misc_feature (884)..(884): n is a, c, g, or t
  misc_feature (926)..(926): n is a, c, g, or t
  misc_feature (936)..(936): n is a, c, g, or t
  misc_feature (954)..(954): n is a, c, g, or t
  misc_feature (959)..(959): n is a, c, g, or t
  misc_feature (964)..(964): n is a, c, g, or t
  misc_feature (967)..(967): n is a, c, g, or t
  misc_feature (975)..(975): n is a, c, g, or t
  misc_feature (978)..(978): n is a, c, g, or t
  misc_feature (986)..(986): n is a, c, g, or t
  misc_feature (996)..(996): n is a, c, g, or t
  misc_feature (998)..(998): n is a, c, g, or t
  misc_feature (1011)..(1011): n is a, c, g, or t
  misc_feature (1014)..(1014): n is a, c, g, or t
  misc_feature (1027)..(1028): n is a, c, g, or t
  misc_feature (1044)..(1044): n is a, c, g, or t
  misc_feature (1049)..(1049): n is a, c, g, or t
  misc_feature (1059)..(1059): n is a, c, g, or t
  misc_feature (1061)..(1061): n is a, c, g, or t
  misc_feature (1068)..(1068): n is a, c, g, or t
  misc_feature (1090)..(1090): n is a, c, g, or t
  misc_feature (1096)..(1096): n is a, c, g, or t
  misc_feature (1100)..(1100): n is a, c, g, or t
  misc_feature (1102)..(1102): n is a, c, g, or t
  misc_feature (1108)..(1108): n is a, c, g, or t
  misc_feature (1119)..(1119): n is a, c, g, or t
  misc_feature (1122)..(1122): n is a, c, g, or t
  misc_feature (1127)..(1127): n is a, c, g, or t
  misc_feature (1130)..(1130): n is a, c, g, or t
  misc_feature (1133)..(1133): n is a, c, g, or t
  misc_feature (1135)..(1135): n is a, c, g, or t
  misc_feature (1141)..(1141): n is a, c, g, or t
  misc_feature (1145)..(1145): n is a, c, g, or t
  misc_feature (1178)..(1179): n is a, c, g, or t
  misc_feature (1184)..(1184): n is a, c, g, or t
  misc_feature (1197)..(1197): n is a, c, g, or t
  misc_feature (1199)..(1199): n is a, c, g, or t
  misc_feature (1208)..(1208): n is a, c, g, or t
  misc_feature (1210)..(1210): n is a, c, g, or t
  misc_feature (1213)..(1214): n is a, c, g, or t
  misc_feature (1231)..(1232): n is a, c, g, or t
  misc_feature (1242)..(1243): n is a, c, g, or t
  misc_feature (1248)..(1248): n is a, c, g, or t
  misc_feature (1254)..(1254): n is a, c, g, or t
  misc_feature (1256)..(1256): n is a, c, g, or t
  misc_feature (1258)..(1258): n is a, c, g, or t
  misc_feature (1274)..(1274): n is a, c, g, or t
  misc_feature (1279)..(1279): n is a, c, g, or t
gtcaaagtgcaaatacacagcagagcttcagaatatatcactgatgtccattcgaatgacctgtctacaccacagatccttccatcaaatgaaggtgttaatccacgtttatcggcaagccctcctaaatcaggcaatttgtggccaggattggcaccaccacacaaaaaagctcagtctgcatctccaaagagaaaaaaacagcacaagaaatacagaagtgttatttcagacatatttgatggaacaatcattagttcagtgcagtgtctgacttgtgacagggtgtctgtaaccctcgagacctttcaagatctgtccttgccaattcctggcaaggaagaccttgctaagctgcattcatcaagtcatccaacttctatagtcaaagcaggatcatgtggcgaagcatatgctccacaagggtggatagcttttttcatggaatatgtgaagagctggttttggggtccagtagtaaccttgcaagattgtcttgctgccttctttgccagagatgaactaaaaggtgacaatatgtacagttgtgaaaaatgcaaaaagttgagaaatggagtgaagttttgtaaagtacaaaactttcctgagattttgtgcatccaccttaaaagattcagacatgaactaatgttttccaccaaaatcagtacccatgtttcatttccgctagaaggcttggatcttcagccatttcttgctaaggatagtccagctcaaattgtgacatatgatcttctgtcagtcatttgccatcatggaactgcaagtagnggacactatatagcctactgccgaaacantctaaataatctctggtatgaatttgatgatcagagtgncnctgaagtttcaaaatctactgnacaaaaatgcaaaagcttacgttcttttctataggaagagcngcgaaaaggncccaaaaaaaaaaaaaanggggnggccnccnccctaaanggnggcgaatnaagcttaatnanctgaactgggacnccngttgaaaaatccnntaagggcccccaaacnccctncggatttttncnaaacccncgggtgccccggggggtttttntggggnaaancnagccancttgggggaanttncgggnctnggnanctaaangggnaaaaaatccgggaaaacccccgtgaatattccnngggcnccaaaaaaatttngngggtttccncngtnnccgggccaaaaacaaanntcccgggaannccccnttttancncnaaaaaaacccgttttnccgcn

SEQ ID NO: 453 - DNA, 1008 bp, Homo sapiens
  misc_feature (789)..(789): n is a, c, g, or t
  misc_feature (791)..(791): n is a, c, g, or t
  misc_feature (822)..(822): n is a, c, g, or t
  misc_feature (825)..(825): n is a, c, g, or t
  misc_feature (849)..(849): n is a, c, g, or t
  misc_feature (851)..(851): n is a, c, g, or t
  misc_feature (859)..(859): n is a, c, g, or t
  misc_feature (867)..(867): n is a, c, g, or t
  misc_feature (869)..(869): n is a, c, g, or t
  misc_feature (886)..(886): n is a, c, g, or t
  misc_feature (896)..(896): n is a, c, g, or t
  misc_feature (899)..(899): n is a, c, g, or t
  misc_feature (908)..(908): n is a, c, g, or t
  misc_feature (917)..(917): n is a, c, g, or t
  misc_feature (919)..(919): n is a, c, g, or t
  misc_feature (927)..(927): n is a, c, g, or t
  misc_feature (937)..(938): n is a, c, g, or t
  misc_feature (953)..(953): n is a, c, g, or t
  misc_feature (957)..(957): n is a, c, g, or t
  misc_feature (961)..(962): n is a, c, g, or t
  misc_feature (969)..(969): n is a, c, g, or t
  misc_feature (971)..(972): n is a, c, g, or t
  misc_feature (974)..(974): n is a, c, g, or t
  misc_feature (978)..(978): n is a, c, g, or t
  misc_feature (985)..(985): n is a, c, g, or t
  misc_feature (988)..(988): n is a, c, g, or t
  misc_feature (996)..(996): n is a, c, g, or t
  misc_feature (1004)..(1004): n is a, c, g, or t
  misc_feature (1008)..(1008): n is a, c, g, or t
gagatcaaccagatcgccctcagcccttcgggcaccatgctgtacgccgcctcgggcaatgccgtccgcatctgggagcttagcaggttccagcctgtcggcaagctgactggccacatcggccctgtgatgtgcctgacggtcacccagacggccagccagcatgacctcgtggtgactggctccaaggaccactacgttaagatgttcgagctgggcgagtgtgtgacgggcaccatcggccccactcacaacttcgagcccccgcactacgatggcatcgagtgtctcgccatccagggagacatcctgttcagtggctcccgagataacggcatcaagaagtgggacctagaccagcaggagctcatccagcaaatccccaatgcgcacaaggactgggtgtgcgccctggccttcatcccgggccgccccatgctgctcagcgcctgccgtgcgggtgtcatcaaggtctggaacgtggacaacttcacacccatcggtgagatcaagggccacgacagtcccatcaatgccatctgcaccaatgccaagcatatcttcacagcctccagtgacctgacggtgaagttctggagtgtccggcggttaccccacagcggcccaccctaggagtgaggtcagagggatgcccccggaccctcgaccccagcagcctggacaccatggaagggaagctgtgacccggccgatggggccagctgctctggggacagagggcgtggccccctctcctgccctcctccctctccttggccttcccacagnanactgttccctcatccctcccctgcctctcangancctctgggtgaaaaaaagctgggnangaattaanctgtgaancnaagggcatatccttctngttctcctcnggnatctggcanattgtctcngntgaacggnttgccctttnnaggctttggccatgnggancctnngggagtnannanctgnccatccnccnttcaagantggctccntttn

SEQ ID NO: 454 - DNA, 972 bp, Homo sapiens
  misc_feature (817)..(818): n is a, c, g, or t
  misc_feature (850)..(850): n is a, c, g, or t
  misc_feature (864)..(864): n is a, c, g, or t
  misc_feature (876)..(876): n is a, c, g, or t
  misc_feature (885)..(886): n is a, c, g, or t
  misc_feature (904)..(904): n is a, c, g, or t
  misc_feature (910)..(911): n is a, c, g, or t
  misc_feature (917)..(917): n is a, c, g, or t
  misc_feature (928)..(928): n is a, c, g, or t
  misc_feature (932)..(932): n is a, c, g, or t
  misc_feature (943)..(943): n is a, c, g, or t
  misc_feature (946)..(946): n is a, c, g, or t
  misc_feature (949)..(949): n is a, c, g, or t
  misc_feature (951)..(951): n is a, c, g, or t
  misc_feature (954)..(954): n is a, c, g, or t
  misc_feature (956)..(956): n is a, c, g, or t
  misc_feature (960)..(960): n is a, c, g, or t
  misc_feature (962)..(963): n is a, c, g, or t
  misc_feature (971)..(972): n is a, c, g, or t
gaatttactgactacatgatacggtccaatgagagccactgtagtctgcagatcaaagctctggcgaaaatccatgcctttgttcaagacacgacactgagtgagcctcgacaggcagagatacggaaggagtgcctccgactctgggggatcccagaccaggctcgtgtggctccttcttcctccgaccctaaatcgaagttctttgagctaatccagggcactgagattgacatcttcagctacaagcccacactgctcacctctaaaaccctggagaagatccgccctgtgtttgactaccgctgcatggtatctggcagtgagcagaagttcctcatcggcctggggaaatcccagatctacacatgggatggccgccagtcagaccgctggatcaagctagacctgaagacagagctgccccgggacactctgctatctgtggaaattgtgcatgagctgaaaggggaggggaaggcccagaggaagatcagtgccatccacatcctcgatgtccttgtgctgaatggcaccgacgttcgggagcagcactttaaccagcgaattcagcttgccgagaaatttgtgaaagccgtttccaagcctagtcggcccgacatgaatcccatcagggtgaaggaggtgtacagactggaagagatggagaagatttttgtcaggttggagatgaagatcatcaagggctccagtggcaccccaaagctcagctacacagggcgtgatgaccggcactttgtacccatgggcctctacatcgtcaggacagtgaatgagccctggactatgggattcnncaaaagcttcaagaaaaaagttcttctacaanaagaaaaccaaggnactctacttttngacctcccnngcaaactccatggccccntttcannaagtanctctcctccangccngccctccttancanccncnaanantccngnnggatgccnn

SEQ ID NO: 455 - DNA, 979 bp, Homo sapiens
  misc_feature (698)..(698): n is a, c, g, or t
  misc_feature (716)..(716): n is a, c, g, or t
  misc_feature (748)..(748): n is a, c, g, or t
  misc_feature (759)..(759): n is a, c, g, or t
  misc_feature (779)..(779): n is a, c, g, or t
  misc_feature (789)..(789): n is a, c, g, or t
  misc_feature (791)..(791): n is a, c, g, or t
  misc_feature (803)..(803): n is a, c, g, or t
  misc_feature (818)..(818): n is a, c, g, or t
  misc_feature (854)..(854): n is a, c, g, or t
  misc_feature (858)..(858): n is a, c, g, or t
  misc_feature (867)..(867): n is a, c, g, or t
  misc_feature (869)..(870): n is a, c, g, or t
  misc_feature (874)..(874): n is a, c, g, or t
  misc_feature (883)..(883): n is a, c, g, or t
  misc_feature (888)..(888): n is a, c, g, or t
  misc_feature (894)..(894): n is a, c, g, or t
  misc_feature (896)..(896): n is a, c, g, or t
  misc_feature (900)..(900): n is a, c, g, or t
  misc_feature (907)..(907): n is a, c, g, or t
  misc_feature (916)..(916): n is a, c, g, or t
  misc_feature (919)..(919): n is a, c, g, or t
  misc_feature (926)..(926): n is a, c, g, or t
  misc_feature (928)..(928): n is a, c, g, or t
  misc_feature (932)..(932): n is a, c, g, or t
  misc_feature (937)..(937): n is a, c, g, or t
  misc_feature (940)..(940): n is a, c, g, or t
  misc_feature (944)..(944): n is a, c, g, or t
  misc_feature (963)..(963): n is a, c, g, or t
  misc_feature (976)..(976): n is a, c, g, or t
gggctgcctggaggcagatgctcagccagcattgggcagcccccgcttcctgctcccctacccccttcacatggcagtagttctgggcaccccagcaaaccatattatgctccaggggcgcccactccaagacccctccatgggaagctggaatccctgcatggctgtgtgcaggcattgctccgggagccagcccagccagggctttgggaacagcttgggcaactgtacgagtcagagcacgatagtgaggaggccacacgctgctaccacagcgcccttcgatacggaggaagcttcgctgagctggggccccgcattggccgactgcagcaggcccagctctggaactttcatactggctcctgccagcaccgagccaaggtcctgcccccactggagcaagtgtggaacttgctacaccttgagcacaaacggaactatggagccaagcggggaggtcccccggtgaagcgagctgctgaacccccagtggtgcagcctgtgcctcctgcagcactctcaggcccctcaggggaggagggcctcagccctggaggcaagcgaaggagaggctgcaactctgaacagactggccttcccccagggctgccactgcctccaccaccattaccaccaccaccaccaccaccaccaccaccaccaccaccaccacccctgcctggcctggctaccanccccccatttcagctaancaagccagggctgtggagtaccctgcatgganatgcctggggncccaaagcgcaagggttcancaccccccanancgccaggagcancggcactcgctgccntcacccatatccatacccagctccagcgtaaaccgngcanccccctggncnncggntggtccggntgctnccccangnccangcccccnccccccaanaanaaaaaancntggntggcntgnctgncacccgtcccccggaaatnaccttaaaaaaanaaa

SEQ ID NO: 456 - DNA, 1026 bp, Homo sapiens
  misc_feature (783)..(783): n is a, c, g, or t
  misc_feature (795)..(795): n is a, c, g, or t
  misc_feature (797)..(797): n is a, c, g, or t
  misc_feature (871)..(871): n is a, c, g, or t
  misc_feature (896)..(896): n is a, c, g, or t
  misc_feature (913)..(913): n is a, c, g, or t
  misc_feature (924)..(924): n is a, c, g, or t
  misc_feature (935)..(935): n is a, c, g, or t
  misc_feature (944)..(944): n is a, c, g, or t
  misc_feature (986)..(986): n is a, c, g, or t
  misc_feature (989)..(989): n is a, c, g, or t
  misc_feature (1000)..(1000): n is a, c, g, or t
  misc_feature (1003)..(1003): n is a, c, g, or t
  misc_feature (1005)..(1006): n is a, c, g, or t
  misc_feature (1011)..(1012): n is a, c, g, or t
  misc_feature (1017)..(1017): n is a, c, g, or t
  misc_feature (1020)..(1020): n is a, c, g, or t
  misc_feature (1024)..(1025): n is a, c, g, or t
gcccacgcgtccgccccagtcctgtctaggtccccgtcgggggacagaccagcagtaggacacagtggcttgaagcccctctctggggagaccccgctctcggcttacaaagtgaagagccgcaccaagatcatccggagacgcggcagcacaagccttcctggagacaagaaaagcggcacctcacctgccgccaccgccaagagccacctcagcctccggcggagacaggccctcagggggaagagcagccctgtcctgaagaagacccccaacaagggcctggtacaggtcaccacgcaccgactatgtcgcctgccaccgagccgggcccacctccccaccaaggaagcgtccagcctgcatgccgtgcggactgcacccaccagcaaggtgatcaagacccgctaccgcattgtcaagaagacgccggcctcgcctctcagcgccccgcccttccccctgtctctgccctcctggcgggcccggcggctctcactatccaggtccctggtgctgaaccgcctgcgtccagttgccagcgggggtgggaaagcccaaccgggctccccttggtggcggagcaaaggctaccgctgcatcggaggggtcctctacaaagtatctgccaacaagctctccaagacctccggccagcccagtgatgcgggcagcaggcccctcctgcgcacaggccggctggatcctgcaggcagctgtagccgttccctggccagccgggcagtgcagcgcagcctggccatcatccggcaggcgcggcancgcagggagaanangaaggagtactgcatgtactacaaccgcttcggcaggtgcaaccgtggcgagcgctgcccctacatccacgatnccgaaaaggtggccgtgtgcaccangttttgtccggggcacntgcaaaaaaanggatgggaacntgccccttntcccaccatgtgtccaaggaaaaaatgcgggtgtgctcttanttnctgaagggatntgnannaaaannaattntcntttnnc

SEQ ID NO: 457 - DNA, 973 bp, Homo sapiens
  misc_feature (679)..(679): n is a, c, g, or t
  misc_feature (689)..(689): n is a, c, g, or t
  misc_feature (696)..(696): n is a, c, g, or t
  misc_feature (713)..(713): n is a, c, g, or t
  misc_feature (718)..(718): n is a, c, g, or t
  misc_feature (732)..(732): n is a, c, g, or t
  misc_feature (739)..(739): n is a, c, g, or t
  misc_feature (744)..(744): n is a, c, g, or t
  misc_feature (766)..(766): n is a, c, g, or t
  misc_feature (769)..(769): n is a, c, g, or t
  misc_feature (807)..(807): n is a, c, g, or t
  misc_feature (815)..(815): n is a, c, g, or t
  misc_feature (823)..(823): n is a, c, g, or t
  misc_feature (833)..(833): n is a, c, g, or t
  misc_feature (837)..(837): n is a, c, g, or t
  misc_feature (843)..(843): n is a, c, g, or t
  misc_feature (849)..(849): n is a, c, g, or t
  misc_feature (851)..(851): n is a, c, g, or t
  misc_feature (854)..(854): n is a, c, g, or t
  misc_feature (864)..(864): n is a, c, g, or t
  misc_feature (869)..(869): n is a, c, g, or t
  misc_feature (878)..(878): n is a, c, g, or t
  misc_feature (884)..(884): n is a, c, g, or t
  misc_feature (893)..(893): n is a, c, g, or t
  misc_feature (895)..(896): n is a, c, g, or t
  misc_feature (898)..(898): n is a, c, g, or t
  misc_feature (900)..(900): n is a, c, g, or t
  misc_feature (903)..(903): n is a, c, g, or t
  misc_feature (907)..(907): n is a, c, g, or t
  misc_feature (914)..(914): n is a, c, g, or t
  misc_feature (916)..(916): n is a, c, g, or t
  misc_feature (926)..(926): n is a, c, g, or t
  misc_feature (929)..(929): n is a, c, g, or t
  misc_feature (934)..(934): n is a, c, g, or t
  misc_feature (937)..(937): n is a, c, g, or t
  misc_feature (950)..(950): n is a, c, g, or t
  misc_feature (952)..(952): n is a, c, g, or t
  misc_feature (954)..(954): n is a, c, g, or t
  misc_feature (961)..(961): n is a, c, g, or t
  misc_feature (968)..(968): n is a, c, g, or t
  misc_feature (971)..(971): n is a, c, g, or t
gacgccggtcgcttccacagcaccaagaagggcaatttccacgagatcttcaatctgacagaaaacgagcgtccgctggcggtgtgcgagaatggctggcgctgctgcctcatcaacagggaccggaagatgcccacggactacatcaggaacggggtgctctacgtcacggagaattacttgtgcttcgaaagctccaaatctgggtcctcaaagaggaacaaagtcatcaagctagtggacatcacggacatccagaagtacaaggtcctgtctgtcctcccaggctcaggcatggggattgccgtgtcgacgccatccacccagaaaccgctcgtgtttggtgccatggtgcacagggatgaggccttcgagaccattctcagccagtacatcaagatcacctcagcggcagcgtctggcggggacagctagtattgacttgcccaggacgttgctggaattttctttttctttttctttttctttttttttttttacgatttggtagtggaaacaattggacatcctcatgagcttttgcaataattctcctggacctgtggttctattgtgttgacctctgcgttttatcgaccaagaaggggccagggctcacagggacgggggtgcccctctcccacagggcacgtcaggtgcctctgagggccacccgcanactggggganggggcanaggccctcgggggcccntgganaaaacacacagganccctggncctgnccttctccgttccagcctgganaanaaacctctccagccaccccaaaaagttctcgcaacctngtgtcccnctctccanaggccaaaanctcntccccnccaaancntanctgaaaaggnggggnccttcctcntggganaaaaaaatntnntnangangganatggggncnttcccaaccnccnaaaanggnctgggggccctcntncncttaaanaaaaccnccngg

SEQ ID NO: 458 - DNA, 910 bp, Homo sapiens
  misc_feature (693)..(693): n is a, c, g, or t
  misc_feature (710)..(710): n is a, c, g, or t
  misc_feature (715)..(715): n is a, c, g, or t
  misc_feature (769)..(769): n is a, c, g, or t
  misc_feature (818)..(818): n is a, c, g, or t
  misc_feature (832)..(832): n is a, c, g, or t
  misc_feature (850)..(850): n is a, c, g, or t
  misc_feature (855)..(856): n is a, c, g, or t
  misc_feature (862)..(862): n is a, c, g, or t
  misc_feature (865)..(865): n is a, c, g, or t
  misc_feature (870)..(872): n is a, c, g, or t
  misc_feature (885)..(886): n is a, c, g, or t
  misc_feature (902)..(902): n is a, c, g, or t
  misc_feature (905)..(906): n is a, c, g, or t
  misc_feature (910)..(910): n is a, c, g, or t
gctccggggagcagctcctgtggggcagaacggctacacacagttgggggacctggctcagcccggccccgagctttctcccacagcggggtacacagcctggacggcggagaagtagacagtcaggcgctacaggaactgacgcagatggtgtctggccctgcatcgtactctggcccaaagccttctacccagtatggagctccaggaccctttgcagcccctggtgagggaggtgccttggcggccactgggcggcccccgctgctgcccacccgagcttctcgttctcagcgtgcggccagtgaggacatgacgagtgatgaggagcgcatggtcatctgtgaggaggaaggggatgatgatgtcattgctgacgatggcttcggcaccactgacattgatctcaagtgcaaggagcgggtgaccgacagcgagagtggggacagctctggggaggacccagagggcaacaagggctttggtcggaaggtgttttcacctgtgatccgttcctcctttacccactgccgccccccactggaccctgagcccccagggcccccggatcctcctgtagcctttggcaaaggctatggttccgccccatcctcctctgcgtcctcgcctgcttcctcctcagcctcggcagccacctccttctcactgggctcaggaaccttcaaggcccangagtctggtcagggcancacancgggccccctacggcccccaccccctggggctgggggtccagcgacaccttccnaaggcaacccggttcctcccaatggatcctgccacctttccggcgcaanaaacccaaaagtgngggttggcctggaaaccnaccanncccctnaantcatnnnggccccctcccannggaagaagaaacttcntgnnaaan

SEQ ID NO: 459 - DNA, 1193 bp, Homo sapiens
  misc_feature (776)..(776): n is a, c, g, or t
  misc_feature (786)..(786): n is a, c, g, or t
  misc_feature (814)..(814): n is a, c, g, or t
  misc_feature (819)..(819): n is a, c, g, or t
  misc_feature (852)..(852): n is a, c, g, or t
  misc_feature (889)..(889): n is a, c, g, or t
  misc_feature (894)..(894): n is a, c, g, or t
  misc_feature (912)..(912): n is a, c, g, or t
  misc_feature (937)..(938): n is a, c, g, or t
  misc_feature (940)..(940): n is a, c, g, or t
  misc_feature (951)..(951): n is a, c, g, or t
  misc_feature (953)..(953): n is a, c, g, or t
  misc_feature (966)..(966): n is a, c, g, or t
  misc_feature (971)..(972): n is a, c, g, or t
  misc_feature (978)..(978): n is a, c, g, or t
  misc_feature (993)..(993): n is a, c, g, or t
  misc_feature (996)..(996): n is a, c, g, or t
  misc_feature (1023)..(1023): n is a, c, g, or t
  misc_feature (1033)..(1033): n is a, c, g, or t
  misc_feature (1045)..(1045): n is a, c, g, or t
  misc_feature (1054)..(1054): n is a, c, g, or t
  misc_feature (1058)..(1058): n is a, c, g, or t
  misc_feature (1079)..(1080): n is a, c, g, or t
  misc_feature (1087)..(1087): n is a, c, g, or t
  misc_feature (1107)..(1107): n is a, c, g, or t
  misc_feature (1116)..(1116): n is a, c, g, or t
  misc_feature (1120)..(1120): n is a, c, g, or t
  misc_feature (1123)..(1123): n is a, c, g, or t
  misc_feature (1130)..(1130): n is a, c, g, or t
  misc_feature (1139)..(1139): n is a, c, g, or t
  misc_feature (1143)..(1143): n is a, c, g, or t
  misc_feature (1145)..(1145): n is a, c, g, or t
  misc_feature (1148)..(1148): n is a, c, g, or t
  misc_feature (1155)..(1156): n is a, c, g, or t
  misc_feature (1160)..(1160): n is a, c, g, or t
  misc_feature (1168)..(1168): n is a, c, g, or t
  misc_feature (1170)..(1170): n is a, c, g, or t
  misc_feature (1177)..(1177): n is a, c, g, or t
  misc_feature (1180)..(1180): n is a, c, g, or t
  misc_feature (1185)..(1185): n is a, c, g, or t
  misc_feature (1187)..(1187): n is a, c, g, or t
ggtttggttggaggccaggggagtgagaggctgtcttcaatgaatcttgggtataaacactaccagggtattgacaactaccccctggactgggaactgtcgtatgcctactacagcaacattgccaccaagacaccccttgaccagcacacactgcaaggagatcaggcatatgttgaaacaattagactaaaagatgatgaaatactcaaggtacaaaccaaagaagatggagatgtctttatgtggttgaagcatgaagctacccgaggcaatgcagcagctcagcaacgattggcccagatgctgttctgggggcagcaaggtgtggccaagaatcccgaagcagcaattgagtggtacgccaagggcgccctggagacggaggatcctgcgttaatctatgactatgccattgtgctattcaagggtcaaggagtaaaaaagaacagacggcttgccttagagctgatgaagaaagcagcttccaagggattgcatcaggcagtcaatggcctgggatggtattaccacaaattcaagaaaaattacgccaaagcagcaaagtactggttaaaagcagaagaaatggggaacccagatgcgtcatacaatcttggagtcctgcatttggatggcatcttccctggagttcctggaaggaatcaaactttagctggtgaatatttccataaggctgcgcaaggtggacacatggaagggaccttgtggtgttctctctactatatcacaggcaacctggagacattccctanagatcctganaaagctgttgtatgggcaaaacatgtanctganaaaaatggctacttgggccatgtcatccgcaanggcctcaatgcctacctggaaggttcatggcatgaanctttngctgtattatgttttacnaccaaaaactggaattgaagtgtcnnanacaatttaccncncatctgtgagganagccnnacctgnccagaaaaactgggngtnactggtttggaaaacaaaatttcccgntttcaaccangcccctccttgnaattgaaangganactttatattggccccaaccnnccaaacnggatttttggcaattacccnaccccctgnaggnaancccgganttttaccgnccgntntcnggagggnnaaancccccccntntggattnggnaatgncnccccct

SEQ ID NO: 460 - DNA, 1015 bp, Homo sapiens
  misc_feature (677)..(677): n is a, c, g, or t
  misc_feature (720)..(720): n is a, c, g, or t
  misc_feature (769)..(769): n is a, c, g, or t
  misc_feature (789)..(789): n is a, c, g, or t
  misc_feature (791)..(791): n is a, c, g, or t
  misc_feature (800)..(800): n is a, c, g, or t
  misc_feature (804)..(804): n is a, c, g, or t
  misc_feature (824)..(824): n is a, c, g, or t
  misc_feature (827)..(827): n is a, c, g, or t
  misc_feature (835)..(835): n is a, c, g, or t
  misc_feature (844)..(844): n is a, c, g, or t
  misc_feature (869)..(869): n is a, c, g, or t
  misc_feature (885)..(885): n is a, c, g, or t
  misc_feature (894)..(894): n is a, c, g, or t
  misc_feature (898)..(898): n is a, c, g, or t
  misc_feature (911)..(911): n is a, c, g, or t
  misc_feature (913)..(913): n is a, c, g, or t
  misc_feature (919)..(919): n is a, c, g, or t
  misc_feature (927)..(927): n is a, c, g, or t
  misc_feature (929)..(929): n is a, c, g, or t
  misc_feature (936)..(937): n is a, c, g, or t
  misc_feature (947)..(947): n is a, c, g, or t
  misc_feature (954)..(954): n is a, c, g, or t
  misc_feature (966)..(966): n is a, c, g, or t
  misc_feature (974)..(974): n is a, c, g, or t
  misc_feature (977)..(977): n is a, c, g, or t
  misc_feature (979)..(979): n is a, c, g, or t
  misc_feature (981)..(982): n is a, c, g, or t
  misc_feature (985)..(986): n is a, c, g, or t
  misc_feature (990)..(991): n is a, c, g, or t
  misc_feature (999)..(999): n is a, c, g, or t
  misc_feature (1011)..(1011): n is a, c, g, or t
  misc_feature (1013)..(1014): n is a, c, g, or t
gcccacgcgtccgcccacgcgtccgcccacgcgtccgtcatccccaagctgcctcggccgagggacctgcagcccttccccacgtgccaggccctggtctacaggggccacagtgaccttgtccggtgcctcagtgtctctcctgggggccagtggctggtttcaggctctgacgacggctccctgcggctctgggaggtggccactgcccgctgtgtgaggactgttcccgtggggggcgtggtgaagagtgtggcctggaaccccagccccgctgtctgcctggtggctgcagccgtggaggactcggtgctgctgctgaacccagctctgggggaccggctggtggcgggcagcacagatcagctgttgagcgccttcgtcccgcctgaggagccccccttgcagccggcccgctggctggaggcctcagaggaggagcgccaagtgggcctgcggctgcgcatctgccacgggaagccagtgacgcaggtgacctggcacgggcgtggggactacctggccgtggtgctggccacccaaggccacacccaggtgctgattcaccagctgagccgtcgccgcagccagagtccgttccgccgcagccacggacaggtgcagcgagtggccttccaccctgcccggcccttcctgttggtggcgtcccagcgcancgtccgcctctaccacctgctgcgccaggagctcaccaagaanctgatgcccaactgcaagtgggtgtccagcctggcggtgcaccctgcangtgacaacgtcatctgtggnanctacaatancaanctggtgtggtttgaactggnatntttccacnaagccatanaggatgctgaaaaaccaaaaaaggntttgcgggctgtggcnttccacccncggnacccactttttgntnaagttngaaaaagnantgtcatnntctgccaggnaaggggnaaaaagaacttntgaaaaanccntngnnggnncccnncaaggggntaaaaggaaacntnnt

SEQ ID NO: 461 - DNA, 548 bp, Homo sapiens
  misc_feature (235)..(235): n is a, c, g, or t
  misc_feature (237)..(237): n is a, c, g, or t
  misc_feature (256)..(256): n is a, c, g, or t
  misc_feature (258)..(258): n is a, c, g, or t
  misc_feature (260)..(260): n is a, c, g, or t
  misc_feature (268)..(268): n is a, c, g, or t
  misc_feature (280)..(280): n is a, c, g, or t
  misc_feature (290)..(290): n is a, c, g, or t
  misc_feature (294)..(294): n is a, c, g, or t
  misc_feature (298)..(298): n is a, c, g, or t
  misc_feature (300)..(300): n is a, c, g, or t
  misc_feature (312)..(312): n is a, c, g, or t
  misc_feature (318)..(318): n is a, c, g, or t
  misc_feature (327)..(327): n is a, c, g, or t
  misc_feature (335)..(335): n is a, c, g, or t
  misc_feature (353)..(353): n is a, c, g, or t
  misc_feature (360)..(360): n is a, c, g, or t
  misc_feature (368)..(368): n is a, c, g, or t
  misc_feature (374)..(375): n is a, c, g, or t
  misc_feature (385)..(386): n is a, c, g, or t
  misc_feature (389)..(389): n is a, c, g, or t
  misc_feature (402)..(402): n is a, c, g, or t
  misc_feature (412)..(413): n is a, c, g, or t
  misc_feature (438)..(438): n is a, c, g, or t
  misc_feature (446)..(446): n is a, c, g, or t
  misc_feature (452)..(453): n is a, c, g, or t
  misc_feature (465)..(465): n is a, c, g, or t
  misc_feature (469)..(469): n is a, c, g, or t
  misc_feature (490)..(490): n is a, c, g, or t
  misc_feature (493)..(494): n is a, c, g, or t
  misc_feature (496)..(498): n is a, c, g, or t
  misc_feature (503)..(503): n is a, c, g, or t
  misc_feature (526)..(527): n is a, c, g, or t
  misc_feature (530)..(530): n is a, c, g, or t
  misc_feature (533)..(533): n is a, c, g, or t
  misc_feature (546)..(546): n is a, c, g, or t
  misc_feature (548)..(548): n is a, c, g, or t
ggcaacctgcagttgaacttgctgagcaagtccaaggtgtacgaggacccagctctgagcgccatcttcctgcacaacaactacaattacatcctcaagtccctggagaagtctgaactgatccagctggtggcagtgacacagaagactgctgagcgctcctaccgggagcacattgagcagcagatccagacctaccagcgcagctggttaaaggtgactgattacatcgcananaaaaatctacctgtgttcngncnggagtcangctccgggacanggagcggcanattntcangnagggtttaaggncttcantgatggccnccaaaaantgggcaaaatccaaaagncttgggnttttcccnaacccnngcaaaggggnnggnttcccccggcccnaaaaacattnntcaaggaaacctaaggggccttttnaaaaaaantttggnnggggggcctttncccnaaaaacccggaaaaaatttcntcnntnnnggggngaaaaagggggggaaaaaaaaannaanccnttttttaaacccntn

SEQ ID NO: 462 - DNA, 1051 bp, Homo sapiens
  misc_feature (915)..(915): n is a, c, g, or t
  misc_feature (918)..(918): n is a, c, g, or t
  misc_feature (931)..(931): n is a, c, g, or t
  misc_feature (954)..(954): n is a, c, g, or t
  misc_feature (963)..(963): n is a, c, g, or t
  misc_feature (976)..(976): n is a, c, g, or t
  misc_feature (980)..(980): n is a, c, g, or t
  misc_feature (997)..(997): n is a, c, g, or t
  misc_feature (1016)..(1016): n is a, c, g, or t
  misc_feature (1020)..(1021): n is a, c, g, or t
  misc_feature (1025)..(1025): n is a, c, g, or t
  misc_feature (1028)..(1028): n is a, c, g, or t
  misc_feature (1030)..(1030): n is a, c, g, or t
  misc_feature (1037)..(1037): n is a, c, g, or t
  misc_feature (1041)..(1042): n is a, c, g, or t
  misc_feature (1050)..(1050): n is a, c, g, or t
gtgctcttggaccagatcaacagcacctttgttcgctccaaccccagtgtgctccagggcctgcttcgcatcatcccgtacctttcctttggagaggtggagaaaatgcagatcttggtggagcgattcagaccatactgcaactttgataaatatgatgaagatcacagtggtgatgataaagtcttcctggactgcttctgtaaaatagctgctggcatcaagaacaacagcaatgggcaccagctgaaggatctgattctccagaaggggatcacccagaatgcacttgactacatgaaaaagcacatccctagcgccaagaatttggatgccgacatctggaaaaagtttttgtctcgcccagccttgccatttatcctaaggctgcttcggggcctggccatccagcaccctggcacccaggttctgattggaactgattccatcccgaacctgcataagctggagcaggtgtccagtgatgagggcattgggaccttggcagagaacctgctggaagccctgcgggaacaccctgacgtaaacaagaagattgacgcagcccgcagggagacccgggcagagaagaagcgcatggccatggcaatgaggcagaaggccctgggcaccctgggcatgacgacaaatgaaaagggccaggtcgtgaccaagacagcactcctgaagcagatggaagagctgatcgaggagcctggcctcacgtgctgcatctgcagggagggatacaagttccagcccacaaaggtcctgggcatttataccttcacgaaagcgggtagccttggaaggagatggaaaaataagccccggaaacagcagggctacagcaccgtgtccccacttcaacattgtgcactacgactgccatctggctgccgtcaggttggctcnagnccggaaaaatggnaaaatgcccccctgcaaaatgcnacaccaagngcaacgggctccnttcnggttggggacccccagntcctgaatcacttttgccnctgnntggnaananaccaaancttnncctccagna

SEQ ID NO: 463 - DNA, 877 bp, Homo sapiens
  misc_feature (3)..(3): n is a, c, g, or t
  misc_feature (54)..(54): n is a, c, g, or t
  misc_feature (552)..(552): n is a, c, g, or t
  misc_feature (566)..(566): n is a, c, g, or t
  misc_feature (574)..(574): n is a, c, g, or t
  misc_feature (576)..(577): n is a, c, g, or t
  misc_feature (632)..(632): n is a, c, g, or t
  misc_feature (642)..(642): n is a, c, g, or t
  misc_feature (644)..(644): n is a, c, g, or t
  misc_feature (671)..(671): n is a, c, g, or t
  misc_feature (676)..(676): n is a, c, g, or t
  misc_feature (684)..(684): n is a, c, g, or t
  misc_feature (732)..(732): n is a, c, g, or t
  misc_feature (734)..(735): n is a, c, g, or t
  misc_feature (739)..(740): n is a, c, g, or t
  misc_feature (749)..(749): n is a, c, g, or t
  misc_feature (755)..(755): n is a, c, g, or t
  misc_feature (764)..(764): n is a, c, g, or t
  misc_feature (770)..(770): n is a, c, g, or t
  misc_feature (778)..(778): n is a, c, g, or t
  misc_feature (780)..(780): n is a, c, g, or t
  misc_feature (784)..(784): n is a, c, g, or t
  misc_feature (790)..(790): n is a, c, g, or t
  misc_feature (792)..(793): n is a, c, g, or t
  misc_feature (802)..(803): n is a, c, g, or t
  misc_feature (812)..(812): n is a, c, g, or t
  misc_feature (822)..(822): n is a, c, g, or t
  misc_feature (828)..(828): n is a, c, g, or t
  misc_feature (843)..(843): n is a, c, g, or t
  misc_feature (851)..(852): n is a, c, g, or t
  misc_feature (860)..(860): n is a, c, g, or t
  misc_feature (875)..(876): n is a, c, g, or t
ggncgcgctcgcagcatcgcaggcgccgcgtagccgtcgccaccgccgccagcncgtgcgccctcggcgcgtacccgccgcgctcccatccccgccgccggccaggggcgcgctcggccgccccggacagtgtcccgctgcggctccgcggcgatggccaccaagatcgacaaagaggcttgccgggcggcgtacaacctggtgcgcgacgacggctcggccgtcatctgggtgacttttaaatatgacggctccaccatcgtccccggcgagcagggagcggagtaccagcacttcatccagcagtgcacagatgacgtccggttgtttgccttcgtgcgcttcaccaccggggatgccatgagcaagaggtccaagtttgccctcatcacgtggatcggtgagaacgtcagcgggctgcagcgcgccaaaaccgggacggacaagaccctggtgaaggaggtcgtacagaatttcgctaaggagtttgtgatcagtgatcggaaaggagctggaggaagatttcatcaagagcgagctgaagaaggcggngggagccaattacnacgcccananngagtaaccccagcccccgccaaaccaccccttgccaaagtcatctgcctgctccnccgggggganangaacgcccggcctcaactactagcccnccagnccaccaanggaaaaaaaaaaaacccatgaaaaaggcaacgcccgtcacccttgtgntnnaaannccccacctnttccgnctttccttnaaaaanccttgccntngtcntatttnannaaacttcanngaaaccccncttttctttnatcttncttttttctttttcncccccctnnttttttgnttcaaaaaaaaaaannt

SEQ ID NO: 464 - DNA, 1074 bp, Homo sapiens
  misc_feature (836)..(836): n is a, c, g, or t
  misc_feature (845)..(845): n is a, c, g, or t
  misc_feature (861)..(861): n is a, c, g, or t
  misc_feature (898)..(898): n is a, c, g, or t
  misc_feature (911)..(911): n is a, c, g, or t
  misc_feature (916)..(916): n is a, c, g, or t
  misc_feature (920)..(920): n is a, c, g, or t
  misc_feature (933)..(933): n is a, c, g, or t
  misc_feature (944)..(944): n is a, c, g, or t
  misc_feature (948)..(948): n is a, c, g, or t
  misc_feature (951)..(951): n is a, c, g, or t
  misc_feature (964)..(964): n is a, c, g, or t
  misc_feature (972)..(972): n is a, c, g, or t
  misc_feature (992)..(992): n is a, c, g, or t
  misc_feature (996)..(996): n is a, c, g, or t
  misc_feature (1007)..(1007): n is a, c, g, or t
  misc_feature (1011)..(1011): n is a, c, g, or t
  misc_feature (1013)..(1013): n is a, c, g, or t
  misc_feature (1029)..(1029): n is a, c, g, or t
  misc_feature (1037)..(1037): n is a, c, g, or t
  misc_feature (1041)..(1042): n is a, c, g, or t
  misc_feature (1047)..(1047): n is a, c, g, or t
  misc_feature (1056)..(1056): n is a, c, g, or t
  misc_feature (1058)..(1063): n is a, c, g, or t
  misc_feature (1065)..(1065): n is a, c, g, or t
  misc_feature (1067)..(1069): n is a, c, g, or t
ggcaaacgtgttgctcttaccatcgccttgttccacgtagctggcaaggtcttcattcacttgccactgctagtcttccaacccttctggactttctttgctcttgtcttgttttgggtgtactggatcatgacacttctttttcttggcactaccggcagtcctgttcagaatgagcaaggctttgtggagttcaaaatttctgggcctctgcagtacatgtggtggtaccatgtggtgggcctgatttggatcagtgaatttattctagcatgtcagcagatgacagtggcaggagctgtggtaacatactattttactagggataaaaggaatttgccatttacacctattttggcatcagtaaatcgccttattcgttaccacctaggtacggtggcaaaaggatctttcattatcacattagtcaaaattccgcgaatgatccttatgtatattcacagtcagctcaaaggaaaggaaaatgcttgtgcacgatgtgtgctgaaatcttgcatttgttgcctttggtgtcttgaaaagtgcctaaattatttaaatcagaatgcatacacagccacagctatcaacagcaccaacttctgcacctcagcaaaggatgcctttgtcattctggtggagaatgctttgcgagtggctaccatcaacacagtaggagattttatgttattccttggcaaggtgctgatagtctgcagcacaggtttagctgggattatgctgctcaactaccagcaggactacacagtatgggtgctgcctctgatcatcgtctgcctctttgctttcctagtcgctcattgcttcctgtctanttatgaaangggaggggaggaatantcctgggtttgccatgaaacaaaaacaatgatgggancctggcaaaaatnctaangganaagtgctgatganttggggaaacntagnaancatgaaaaactgnaaggagcnccctaatccaaaactaaccnagcnaaaaaaggganggcncngacccgaaaagaaccnaaaagtgntaannagttnccccccccncnnnnnnancnnnaaaaa

SEQ ID NO: 465 - DNA, 1091 bp, Homo sapiens
  misc_feature (778)..(778): n is a, c, g, or t
  misc_feature (819)..(819): n is a, c, g, or t
  misc_feature (845)..(845): n is a, c, g, or t
  misc_feature (849)..(849): n is a, c, g, or t
  misc_feature (861)..(861): n is a, c, g, or t
  misc_feature (871)..(871): n is a, c, g, or t
  misc_feature (877)..(877): n is a, c, g, or t
  misc_feature (882)..(882): n is a, c, g, or t
  misc_feature (893)..(893): n is a, c, g, or t
  misc_feature (895)..(895): n is a, c, g, or t
  misc_feature (898)..(898): n is a, c, g, or t
  misc_feature (913)..(913): n is a, c, g, or t
  misc_feature (917)..(917): n is a, c, g, or t
  misc_feature (927)..(927): n is a, c, g, or t
  misc_feature (935)..(936): n is a, c, g, or t
  misc_feature (939)..(939): n is a, c, g, or t
  misc_feature (953)..(953): n is a, c, g, or t
  misc_feature (963)..(963): n is a, c, g, or t
  misc_feature (976)..(976): n is a, c, g, or t
  misc_feature (979)..(979): n is a, c, g, or t
  misc_feature (1003)..(1003): n is a, c, g, or t
  misc_feature (1011)..(1011): n is a, c, g, or t
  misc_feature (1016)..(1016): n is a, c, g, or t
  misc_feature (1028)..(1028): n is a, c, g, or t
  misc_feature (1030)..(1030): n is a, c, g, or t
  misc_feature (1034)..(1034): n is a, c, g, or t
  misc_feature (1041)..(1041): n is a, c, g, or t
  misc_feature (1045)..(1045): n is a, c, g, or t
  misc_feature (1052)..(1052): n is a, c, g, or t
  misc_feature (1054)..(1055): n is a, c, g, or t
  misc_feature (1067)..(1067): n is a, c, g, or t
  misc_feature (1073)..(1073): n is a, c, g, or t
  misc_feature (1078)..(1078): n is a, c, g, or t
  misc_feature (1090)..(1090): n is a, c, g, or t
ggtggagcgatgggaggccttgagaagaagaagtatgaacgaggctcggccaccaactacatcacccggaacaaagcccggaagaagctccagctgagcttggctgactttaggcggctgtgcattctgaagggcatttatccccatgaacccaaacacaagaagaaggttaacaagggttctacagcagcccgaacgttttaccttatcaaagacatcaggtttctcctccacgaacccattgtcaacaagttccgtgaatacaaggtgttcgtccggaagctccggaaggcttatgggaagagcgagtggaacactgtagagcgtttaaaggacaataagcccaactacaaactcgaccacatcatcaaggaacggtatcccacgttcatcgatgccctgcgggacctggacgatgccctctccatgtgcttcctgttttccaccttcccgcggactggcaagtgccacgtgcagaccattcagctgtgccgccggctcactgtggagttcatgcactacattatcgctgcccgtgccctgcgcaaggtcttcctgtccatcaaaggcatttactaccaggccgaggtactggggcagcccatcgtgtggatcactccctatgccttctcccatgaccacccgacagacgtggactacagggtcatggccaccttcaccgagttctacaccacgctgctgggctttgtcaacttccgcctttaccagttgctcaacctccactatcccccgaagctcgagggtcaggcccaagcanaggcaaaggccggtgagggcacctacgcgttggactccganagttgtatggagaaactggcagcccntcantgccagcctggncccgcgtggnggtgcntgccncaaaagaagangnccnaggtggatgaatttncccnccgatggggnaaatgtcnnccncaggagaaaaaccnccaggaaagnacctggaggcccnagnaaaaaccccaaaaaacttttttgngggccttnaattntttctgaaaccnanaggngccccgngagncctggcntnntctcagaatttngggggnaaatntcctgggaaaant

SEQ ID NO: 466 - DNA, 1027 bp, Homo sapiens
  misc_feature (508)..(508): n is a, c, g, or t
  misc_feature (714)..(714): n is a, c, g, or t
  misc_feature (728)..(728): n is a, c, g, or t
  misc_feature (736)..(736): n is a, c, g, or t
  misc_feature (739)..(739): n is a, c, g, or t
  misc_feature (754)..(754): n is a, c, g, or t
  misc_feature (773)..(773): n is a, c, g, or t
  misc_feature (782)..(782): n is a, c, g, or t
  misc_feature (785)..(785): n is a, c, g, or t
  misc_feature (805)..(805): n is a, c, g, or t
  misc_feature (810)..(810): n is a, c, g, or t
  misc_feature (841)..(841): n is a, c, g, or t
  misc_feature (848)..(848): n is a, c, g, or t
  misc_feature (866)..(866): n is a, c, g, or t
  misc_feature (885)..(885): n is a, c, g, or t
  misc_feature (888)..(888): n is a, c, g, or t
  misc_feature (894)..(894): n is a, c, g, or t
  misc_feature (899)..(899): n is a, c, g, or t
  misc_feature (909)..(909): n is a, c, g, or t
  misc_feature (912)..(912): n is a, c, g, or t
  misc_feature (915)..(915): n is a, c, g, or t
  misc_feature (923)..(923): n is a, c, g, or t
  misc_feature (948)..(948): n is a, c, g, or t
  misc_feature (952)..(952): n is a, c, g, or t
  misc_feature (955)..(955): n is a, c, g, or t
  misc_feature (963)..(963): n is a, c, g, or t
  misc_feature (977)..(977): n is a, c, g, or t
  misc_feature (981)..(981): n is a, c, g, or t
  misc_feature (987)..(987): n is a, c, g, or t
  misc_feature (989)..(989): n is a, c, g, or t
  misc_feature (997)..(997): n is a, c, g, or t
  misc_feature (1002)..(1003): n is a, c, g, or t
  misc_feature (1008)..(1008): n is a, c, g, or t
  misc_feature (1010)..(1011): n is a, c, g, or t
  misc_feature (1021)..(1021): n is a, c, g, or t
  misc_feature (1026)..(1026): n is a, c, g, or t
ggcgttggaagggccatacccagtggaggagatccgtctgccaagagctgggggccctctggggcttagtattgtcggaggctccgaccattccagccacccgtttggtgtccaggagcctggtgtgttcatctccaaggtgctcccgcggggcctggccgctcgcagcggcctgcgggttggggaccgcatcctggcagtgaacgggcaagacgtgcgggatgccacgcaccaagaagcagtcagtgccctgctccggccctgcctggagctgtcgctgctggtgcggagggacccggcacccccgggcctacgggaactgtgcatccagaaggcacctggggagaggctgggcatcagcatccgcgggggtgccaggggccacgctggcaacccccgcgaccccacagacgagggcatcttcatctccaaggtgagccccacgggggcagccgggcgcgacggtcggctgcgtgtgggtttgcggctgttggaggtgaaccagcanagcctgctgggcctgacgcacggcgaggcggtgcagctgctccgcagtgtgggcgacaccctcaccgtgctggtctgtgacggcttcgaggccagcaccgacgcagccctggaggtgtccccaggtgtcattgccaacccctttgcggcaggcatcggccaccggaacagcctggagagcatctcttccatcgaccgggagctganccctgaaggcccangcaagganaangagctgcctggacanaccctgcactgggggcccnaggccacanaanccgcaggtcggggtctgcanccccntgaagctggactaccgcgccctggccgcccntgcccancgctggcaacgtgcaaanggttaaccgtctggaacanctngaaggnaaaanggctgaatcnccntgntccctaantggccaaaaaccgcccctccccgcntttntcngaataaantgccccccaatttnaaanaaggcntnaaagggcntttcnnggccntnnccaatttttnacccnc

SEQ ID NO: 467 - DNA, 792 bp, Homo sapiens
ggccgagagaacttctttcctgtgacagtggtgcccacagcccctgaccctgtgccagctgactctgtccagcggcccagtgatgctcacaccaagcctcgccctgcactagctgccgccacaactattatcacctgccctccgtcagcatcagcttccaccctggaccagtccaaggaccctgggcctccccggccacacaggcctgaagctacccccagcatggcctctctgggcccagagggagaagagctggcgagagtggcagagggcaccagcttcccgcctcaggagccacggcacagtccgcaggtgaagatggcccccacaagttccccggcagagccacactgctggccggcagaggctgccctgggcacaggcgctgagcccacctgcagccaggctgccagctccaaggcccccagcagtgggagtgcccagccaccagagggtcacccaggcaagcctgagcccagccgggctaagtcccgccccctgcccaacatgccaaagctggtcatcccctccgccgccaccaagttcccccctgagatcaccgtcacgccacccaccccaaccctgctctcccccaaaggcagcatctcggaggagaccaagcagaagctgaagtcagccatcctttctgcccagtctgctgccaacgtgaggaaggagagcctatgccagccagccctggaggtcctggagacatccagccaggagtcctcgctggagagcgagacagacgaggacgacgactacatggacatttgaggggccactgcagcc

SEQ ID NO: 468 - DNA, 764 bp, Homo sapiens
  misc_feature (525)..(525): n is a, c, g, or t
  misc_feature (533)..(533): n is a, c, g, or t
  misc_feature (574)..(574): n is a, c, g, or t
  misc_feature (601)..(601): n is a, c, g, or t
  misc_feature (620)..(620): n is a, c, g, or t
  misc_feature (626)..(626): n is a, c, g, or t
  misc_feature (678)..(678): n is a, c, g, or t
  misc_feature (683)..(683): n is a, c, g, or t
  misc_feature (685)..(685): n is a, c, g, or t
  misc_feature (705)..(705): n is a, c, g, or t
  misc_feature (714)..(715): n is a, c, g, or t
  misc_feature (720)..(721): n is a, c, g, or t
  misc_feature (725)..(725): n is a, c, g, or t
  misc_feature (734)..(734): n is a, c, g, or t
  misc_feature (741)..(741): n is a, c, g, or t
  misc_feature (747)..(747): n is a, c, g, or t
  misc_feature (749)..(749): n is a, c, g, or t
  misc_feature (751)..(751): n is a, c, g, or t
  misc_feature (755)..(756): n is a, c, g, or t
gcccacgcgtccgaattcgtgatggcgggggctggttccgccgctgtatcgggggcagggaccccggtggcggggcccacaggccgcgaccttttcgccgaagggctgctggagttcctgcgacccgctgtgcagcagctcgactctcacgtacacgccgtcagagagagccaggtagagctccgggaacaaattgacaacctagccacagaactgtgccgcataaatgaggatcagaaggtggccctggatcttgacccctatgttaagaagctacttaatgcccggcgacgcgttgtcttggttaacaacattctacagaatgctcaggaacgactgagacggctaaaccacagtgttgccaaggaaacagcccgcaggagagcaatgctggattcgggaatttacccccctggctccccaggcaaataacagatgagcctatggactcagtagcacaagtactgttccccagctgccttgtttcaacagacatgcaaagatcctaggagacagtccccatanaccttcanacattaaaaagggagccgtacagtttgtttgaagcacttcntcttacccatttatgtaggggccccangaaacctacacacagccanaatgangttcccaaaggacttacattaattatggctcttgcttcctttcaaaagtganctgangnctctactttttttttttaanctgcatacnngaggnnttanctttcttcngaataanttaacnanangggnnttcctttt

SEQ ID NO: 469 - DNA, 972 bp, Homo sapiens
  misc_feature (542)..(542): n is a, c, g, or t
  misc_feature (544)..(548): n is a, c, g, or t
  misc_feature (551)..(552): n is a, c, g, or t
  misc_feature (554)..(559): n is a, c, g, or t
  misc_feature (602)..(602): n is a, c, g, or t
  misc_feature (607)..(607): n is a, c, g, or t
  misc_feature (624)..(624): n is a, c, g, or t
  misc_feature (633)..(633): n is a, c, g, or t
  misc_feature (684)..(684): n is a, c, g, or t
  misc_feature (717)..(717): n is a, c, g, or t
  misc_feature (721)..(721): n is a, c, g, or t
  misc_feature (728)..(728): n is a, c, g, or t
  misc_feature (730)..(730): n is a, c, g, or t
  misc_feature (738)..(738): n is a, c, g, or t
  misc_feature (742)..(742): n is a, c, g, or t
  misc_feature (748)..(748): n is a, c, g, or t
  misc_feature (750)..(750): n is a, c, g, or t
  misc_feature (776)..(776): n is a, c, g, or t
  misc_feature (783)..(783): n is a, c, g, or t
  misc_feature (813)..(814): n is a, c, g, or t
  misc_feature (833)..(833): n is a, c, g, or t
  misc_feature (838)..(839): n is a, c, g, or t
  misc_feature (847)..(848): n is a, c, g, or t
  misc_feature (850)..(850): n is a, c, g, or t
  misc_feature (859)..(859): n is a, c, g, or t
  misc_feature (866)..(866): n is a, c, g, or t
  misc_feature (880)..(880): n is a, c, g, or t
  misc_feature (884)..(884): n is a, c, g, or t
  misc_feature (891)..(891): n is a, c, g, or t
  misc_feature (911)..(911): n is a, c, g, or t
  misc_feature (916)..(917): n is a, c, g, or t
  misc_feature (951)..(951): n is a, c, g, or t
  misc_feature (957)..(957): n is a, c, g, or t
  misc_feature (969)..(970): n is a, c, g, or t
ggcggcatggggggacctcgcactgttgtggcaggcagcagcgacgctgcccaaaaggctgtccgggcaatggcagtgctgacagatcacccatatgcctccctgaccctcccagatgacgcagctgctgactgtctctttcttcgtcctgggttgcctggtgtgccccctttcctcctgcaccgtggaggtggggatctgcccaacagccaggaggcactgcagaagctctctgatgtcaccctggtacctgtgtcctgctcagaactggagaaggctggcgccgggctcagctccctctgcttggtgctcagcacacgcccccacagctgagggcctggccttggggtactgctggccaggggtaggatagtataggaagtagaaggggaaggagggttagatagagaatgctgaataggcagtagttgggagagagcctcaatattgggggaggggagagtgtagggaaaaggatccactgggtgaatcctccctctcagaaccaataaaatagaattgaccttttaaaaaaaaaaaanannnnnaannannnnnnagggcggccgctccctatagtgagtcgtattaagcttaattanctgancttggactcctgttganaaatccagnaatgacctcaaaactcccatctggatttttttcaaaaacgctcggttgccnccgggcgtttttttatttggtgaaaaatcccanctancttggcnanatttttanggancctaangnaacctaaaaatggaaaaaaaaaatcnctggganaaaccccccgttgaaaaaatccccaatggnnatccaaaaaaaaaattttnaggcnntttcaatnnanttgccccanggaaccnaaaaaccaaaaccnttcnactgganattaacggccttttttaaanacccnnaaaaaaaaaaaaaaccccaaaatttttttcccgncctttnattcaatttttnncc

SEQ ID NO: 470 - DNA, 648 bp, Homo sapiens
  misc_feature (565)..(565): n is a, c, g, or t
  misc_feature (591)..(591): n is a, c, g, or t
  misc_feature (599)..(599): n is a, c, g, or t
  misc_feature (618)..(619): n is a, c, g, or t
  misc_feature (625)..(625): n is a, c, g, or t
  misc_feature (628)..(633): n is a, c, g, or t
  misc_feature (635)..(636): n is a, c, g, or t
  misc_feature (638)..(640): n is a, c, g, or t
  misc_feature (642)..(644): n is a, c, g, or t
  misc_feature (646)..(648): n is a, c, g, or t
ggagaaatggagctagaactggcacagaccaaactccagctggtggaggccgagtgtaagatacaggacttggaacaccatttagggcttgccctcaatgaggtgcaggcagccaagaagacgtggtttaaccgaacactgagctccataaagacagcaaccggggttcaagggaaagagacttgctgagagcagctgccgcctcccgacaccttcagaaaacacgacaccttttgttgccttctttggccagatgtgtgattctgtgacttgtcccaggaccagaatgtacctaagtcagatccatagacgcatgttggtaggtcactggatcagagcttgtgaagcaggcaacctctggggtaagactactgatactaacaggcctgctagctcagccgacgctctggacactctagaaatcactcctcagtgtgacctcccaggcctcttccccgtgtacgtcaacacctcacccagcctaaaggctgagtttacatgatcagagttaggggatccttcagtctgttgattttttttctaaaccttttttttttaatatacntatatatatatatatatatatatatntatatatntatatatatatatatatanngggggnggnnnnnngnntnnnannntnnn

SEQ ID NO: 471 - DNA, 1027 bp, Homo sapiens
  misc_feature (742)..(742): n is a, c, g, or t
  misc_feature (753)..(753): n is a, c, g, or t
  misc_feature (761)..(761): n is a, c, g, or t
  misc_feature (765)..(765): n is a, c, g, or t
  misc_feature (770)..(770): n is a, c, g, or t
  misc_feature (777)..(777): n is a, c, g, or t
  misc_feature (795)..(795): n is a, c, g, or t
  misc_feature (825)..(825): n is a, c, g, or t
  misc_feature (828)..(828): n is a, c, g, or t
  misc_feature (837)..(837): n is a, c, g, or t
  misc_feature (843)..(843): n is a, c, g, or t
  misc_feature (849)..(849): n is a, c, g, or t
  misc_feature (858)..(858): n is a, c, g, or t
  misc_feature (867)..(867): n is a, c, g, or t
  misc_feature (879)..(879): n is a, c, g, or t
  misc_feature (885)..(885): n is a, c, g, or t
  misc_feature (895)..(896): n is a, c, g, or t
  misc_feature (900)..(901): n is a, c, g, or t
  misc_feature (903)..(903): n is a, c, g, or t
  misc_feature (909)..(909): n is a, c, g, or t
  misc_feature (913)..(913): n is a, c, g, or t
  misc_feature (929)..(929): n is a, c, g, or t
  misc_feature (933)..(933): n is a, c, g, or t
  misc_feature (935)..(935): n is a, c, g, or t
  misc_feature (941)..(941): n is a, c, g, or t
  misc_feature (959)..(959): n is a, c, g, or t
  misc_feature (966)..(966): n is a, c, g, or t
  misc_feature (983)..(983): n is a, c, g, or t
  misc_feature (993)..(993): n is a, c, g, or t
  misc_feature (1005)..(1005): n is a, c, g, or t
  misc_feature (1011)..(1011): n is a, c, g, or t
  misc_feature (1015)..(1015): n is a, c, g, or t
  misc_feature (1018)..(1018): n is a, c, g, or t
  misc_feature (1026)..(1027): n is a, c, g, or t
gcgggctctgaagagccagaccctcctccagaaccgatgagtgaggagaggcgtcagtggctgcaggaggccatgtcggctgccttccgaggccagcgggaggaggtggagcagatgaagagctgcctccgagtgctgtcacagcccatgccccccactgctggggaggccgagcaggcggccgaccagcaagagcgagagggggccctggagctgctggccgacctgtgtgagaacatggacaatgccgcagacttctgccagctgtctggcatgcacctgctggtgggccggtacctggaggcgggggctgcgggactgcggtggcgggcggcacagctcatcggcacgtgcagtcagaacgtggcagccatccaggagcaggtgctgggcctgggtgccctgcgtaagctgctgcggctgctggaccgcgacgcctgcgacacggtgcgcgtcaaggccctcttcgccatctcctgtctggtccgagagcaggaggctgggctgctgcagttcctccgcctggacggcttctctgtgttgatgagggccatgcagcagcaggtgcagaagctcaaggtcaaatcagcattcctgctgcagaacctgctggtgggccaccctgaacacaaagggaccctgtgctccatggggatggtccagcagctggtggccctggtgcggacagagcacagccccttccacgagcacgtgcttggagccctgtgcagcctggtgacanactttccgcanggtgtgcncgantgtcnggagccngaactgggcctggaaganctcctccgccaccgctgtcagctgctgcancancatgaggantaccangagganctggaattntgtgaaaanctgctacaaacntgtttntccacccaanngaannanacatgnattnggtgaaaccaggtggntttntngccccnttttccgtgggaaacccnaggcctntttgcctccctccccanctaaaaaggnccttttcccaanggaatncccnggncctaagtnn

SEQ ID NO: 472 - DNA, 1138 bp, Homo sapiens
  misc_feature (799)..(799): n is a, c, g, or t
  misc_feature (811)..(812): n is a, c, g, or t
  misc_feature (826)..(826): n is a, c, g, or t
  misc_feature (834)..(835): n is a, c, g, or t
  misc_feature (869)..(869): n is a, c, g, or t
  misc_feature (881)..(881): n is a, c, g, or t
  misc_feature (893)..(893): n is a, c, g, or t
  misc_feature (897)..(897): n is a, c, g, or t
  misc_feature (899)..(899): n is a, c, g, or t
  misc_feature (908)..(908): n is a, c, g, or t
  misc_feature (920)..(920): n is a, c, g, or t
  misc_feature (935)..(935): n is a, c, g, or t
  misc_feature (941)..(941): n is a, c, g, or t
  misc_feature (944)..(945): n is a, c, g, or t
  misc_feature (949)..(949): n is a, c, g, or t
  misc_feature (951)..(951): n is a, c, g, or t
  misc_feature (961)..(961): n is a, c, g, or t
  misc_feature (965)..(965): n is a, c, g, or t
  misc_feature (968)..(968): n is a, c, g, or t
  misc_feature (972)..(972): n is a, c, g, or t
  misc_feature (981)..(981): n is a, c, g, or t
  misc_feature (989)..(989): n is a, c, g, or t
  misc_feature (993)..(993): n is a, c, g, or t
  misc_feature (1011)..(1011): n is a, c, g, or t
  misc_feature (1013)..(1014): n is a, c, g, or t
  misc_feature (1016)..(1017): n is a, c, g, or t
  misc_feature (1022)..(1022): n is a, c, g, or t
  misc_feature (1034)..(1034): n is a, c, g, or t
  misc_feature (1038)..(1038): n is a, c, g, or t
  misc_feature (1044)..(1044): n is a, c, g, or t
  misc_feature (1058)..(1058): n is a, c, g, or t
  misc_feature (1060)..(1060): n is a, c, g, or t
  misc_feature (1072)..(1072): n is a, c, g, or t
  misc_feature (1076)..(1076): n is a, c, g, or t
  misc_feature (1079)..(1079): n is a, c, g, or t
  misc_feature (1092)..(1092): n is a, c, g, or t
  misc_feature (1095)..(1095): n is a, c, g, or t
  misc_feature (1101)..(1101): n is a, c, g, or t
  misc_feature (1115)..(1115): n is a, c, g, or t
  misc_feature (1119)..(1119): n is a, c, g, or t
  misc_feature (1124)..(1124): n is a, c, g, or t
  misc_feature (1132)..(1132): n is a, c, g, or t
gggaaggctgcggaaaagaaagcccgctgggtcctgctggtcctcattctggcggttgtgggcttcggagccctgatgactcagctgtttctatgggaatacggcgacttgcatctctttgggcccaaccagcgcccagccccctgctatgacccttgcgaagcagtgctggtggaaagcattcctgagggcctggacttccccaatgcctccacggggaacccttccaccagccaggcctggctgggcctgctcgccggtgcgcacagcagcctggacatcgcctccttctactggaccctcaccaacaatgacacccacacgcaggagccctctgcccagcagggtgaggaggtcctccggcagctgcagaccctggcaccaaagggcgtgaacgtccgcatcgctgtgagcaagcccagcgggccccagccacaggcggacctgcaggctctgctgcagagcggtgcccaggtccgcatggtggacatgcagaagctgacccatggcgtcctgcataccaagttctgggtggtggaccagacccacttctacctgggcagtgccaacatggactggcgttcactgacccaggtcaaggagctgggcgtggtcatgtacaactgcagctgcctggctcgagacctgaccaagatctttgaggcctactggttcctgggccaggcaggcagctccatccccatcaacttggccccggttctatgacacccgctacaaccaagagacaccaatgggaaatctgcctcaatggaaacccctgctctggcctacctggggnagtgcgcccccnncccctgtgtccaantggccgcnntccaaacttgaaaggctctactcaaacttggtgnaaatgccccgantttcatctaacntccntntcatgaacnacctgcccactnctggaatttctcccnccctcnaanntttngncctgccattnaaanggnttgnggggggccncttaaaancgtngggtttaaggggcccctncnnannacctnttgggaaaattngaancatccnatgggggctttctntntttttttgggtncctnggngaaaacaaaaccnctntaaatnaggtaaaatttttnggtnccccnggaaaaanccagtt

SEQ ID NO: 473 - DNA, 768 bp, Homo sapiens
  misc_feature (592)..(592): n is a, c, g, or t
  misc_feature (699)..(699): n is a, c, g, or t
  misc_feature (705)..(705): n is a, c, g, or t
  misc_feature (714)..(714): n is a, c, g, or t
  misc_feature (717)..(717): n is a, c, g, or t
  misc_feature (722)..(722): n is a, c, g, or t
  misc_feature (735)..(735): n is a, c, g, or t
  misc_feature (741)..(741): n is a, c, g, or t
  misc_feature (747)..(749): n is a, c, g, or t
  misc_feature (754)..(754): n is a, c, g, or t
  misc_feature (756)..(756): n is a, c, g, or t
  misc_feature (758)..(760): n is a, c, g, or t
  misc_feature (762)..(765): n is a, c, g, or t
ggctcgccttacaactccgcgcggcctcggtcccctgcgccgcccgccccacaacaaaactcagcgcagcgctcccgggcgcccggttcagagcgacctgcggctcagagcggaggggagactgaccggagcgcggatcgggacagcggccgggacagcggcgagacgcgcgtgtgtgagcgcgccggaccaagcgggcccagaagcgggtctgcagcccagagggcaccttctgcaaacatgtctgtggatcccctatccagcaaagctctaaagatcaagcgagagctgagcgagaacacgccgcacctgtcggacgaggcgctgatggggctgtcggtgcgcgagctgaaccggcatctgcgcgggctctccgccgaggaggtgacacggctcaagcagcggcgccgcacactcaaaaaccgtggctacgccgccagctgccgcgtgaagcgcgtgtgccagaaggaggagctgcagaagcagaagtcggagctggagcgcgaggtggacaagctggcgcgcgagaacgccgccatgcgcctggagctcgacgcgctgcgcggcaagtgcgaggcgctgcagggcttcncgcgctccgtggccgccgcccgcgggcccgccacgctcgtggcgccggccagcgtcatcaccatcgtcaagtccaccccgggctcggggtctggccccgcccacggnccggancccgcccanggnccggnctcctgctcctantgcccncccccnnnatgcntnannnannnncct

SEQ ID NO: 474 - DNA, 1068 bp, Homo sapiens
  misc_feature (669)..(669): n is a, c, g, or t
  misc_feature (733)..(733): n is a, c, g, or t
  misc_feature (762)..(762): n is a, c, g, or t
  misc_feature (772)..(772): n is a, c, g, or t
  misc_feature (828)..(828): n is a, c, g, or t
  misc_feature (832)..(832): n is a, c, g, or t
  misc_feature (864)..(864): n is a, c, g, or t
  misc_feature (900)..(902): n is a, c, g, or t
  misc_feature (904)..(904): n is a, c, g, or t
  misc_feature (909)..(909): n is a, c, g, or t
  misc_feature (923)..(923): n is a, c, g, or t
  misc_feature (925)..(925): n is a, c, g, or t
  misc_feature (939)..(939): n is a, c, g, or t
  misc_feature (955)..(955): n is a, c, g, or t
  misc_feature (966)..(967): n is a, c, g, or t
  misc_feature (972)..(972): n is a, c, g, or t
  misc_feature (985)..(985): n is a, c, g, or t
  misc_feature (988)..(988): n is a, c, g, or t
  misc_feature (992)..(992): n is a, c, g, or t
  misc_feature (1004)..(1004): n is a, c, g, or t
  misc_feature (1006)..(1006): n is a, c, g, or t
  misc_feature (1031)..(1031): n is a, c, g, or t
  misc_feature (1041)..(1041): n is a, c, g, or t
  misc_feature (1053)..(1053): n is a, c, g, or t
  misc_feature (1055)..(1057): n is a, c, g, or t
  misc_feature (1064)..(1064): n is a, c, g, or t
  misc_feature (1067)..(1067): n is a, c, g, or t
gacctgagtgagctgccaccgctggaggacatgggacaacccccggcggaggaggctgagcagcctggggccctggcccgagagttccttgctgccatggagcccgagcccgccccagccccggccccagaagagtggctggacattctggggaacgggctgttgaggaagaagacgctggtcccagggccgccaggttcgagccgcccggtcaagggccaggtggtcaccgtacatctgcagacgtcgctggagaatggcacacgggtgcaggaggagccggagctggtgttcactctgggtgactgtgacgtcatccaggccctggatctcagtgtcccactcatggacgtgggggagacggccatggtcactgctgactccaagtactgctacggcccccaaggcagcaggagcccatacatccccccgcacgcggccctgtgcctggaggtgaccctgaagacggctgtggacgggcctgacctggagatgctcacggggcaggagcgcgtggccctggccaaccggaagcgggagtgcggcaacgcccactaccagcgggcggacttcgtcctggccgccaactcctacgacctcgccatcaaggctatcacctccagcgccaaagtggacatgacgttcgaggaggaggcacagctcctgcanttgaaggtgaagtgtctgaacaacctggcggcctcgcagctgaagctcgaccactaccgcgcanccctgcgctcctgcagccttgtgctggancaccagccanacaacatcaaggctctcttccgcaagggcaaggtgctggcccagcagggggagtanagtnaggccatccccatcctgagggcacccctgaanctggaaccttccaacaaaaacaattcacgcaaaacnnntnaaacntggtgaaaaaaacntncggcccaacgaaanacggaaaacccctttntaccgaaaatnntgggnaaccccaaccggnttncttntaaattgccctngnaagggtgccttggtccattcccatngaaatggctnttttgggccaantnnntttttcnttng

SEQ ID NO: 475 - DNA, 1005 bp, Homo sapiens
  misc_feature (772)..(772): n is a, c, g, or t
  misc_feature (839)..(839): n is a, c, g, or t
  misc_feature (844)..(844): n is a, c, g, or t
  misc_feature (847)..(847): n is a, c, g, or t
  misc_feature (878)..(878): n is a, c, g, or t
  misc_feature (925)..(925): n is a, c, g, or t
  misc_feature (935)..(936): n is a, c, g, or t
  misc_feature (951)..(951): n is a, c, g, or t
  misc_feature (974)..(975): n is a, c, g, or t
  misc_feature (982)..(982): n is a, c, g, or t
  misc_feature (985)..(986): n is a, c, g, or t
  misc_feature (990)..(990): n is a, c, g, or t
  misc_feature (995)..(997): n is a, c, g, or t
  misc_feature (1003)..(1003): n is a, c, g, or t
ggcatgaagaaggttttccctccagatgagattgagcaggtttccaacaaggatgatatgaagacttccctgaagaaagttgtgaaggagacctcctacgagatgatgatgcagtgtgtgtcccgcatgttggcccaccccctgcatgtcatctcaatgcgctgcatggtccagtttgtgggacgggaggccaagtacagtggtgtgctgagctccattgggaagattttcaaagaggaagggctgctgggattcttcgttggattaatccctcacctcctgggcgatgtggttttcttgtggggctgtaacctgctggcccacttcatcaatgcctacctggtggatgacagcttcagccaggccctggccatccggagctataccaagttcgtgatggggattgcagtgagcatgctgacctaccccttcctgctagttggcgacctcatggctgtgaacaactgcgggctgcaagctgggctccccccttactccccagtgttcaaatcctggattcactgctggaagtacctgagtgtgcagggccagctcttccgaggctccagcctgcttttccgccgggtgtcatcaggatcatgctttgccctggagtaacctgaatcatctaaaaaacacggtctcaacctggccaccgtgggtgaggcctgaccaccttgggacacctgcaagacgactccaacccaacaacaaccagatgtgctccagcccagccgggcttcagttccatatttgccatgtgtctgtccanatgtggggttgaacgggggtggggctgcaccccagtggaatggggtcacccggcaaacctaaggaangtgangcnaggtggggaattggcaaaatcccatacctcncaaaattgctgaatctgtcttgggcaaagggccaaaaaatggcttangggggcccannttggaggggaaaggntaagggggtcaaacccaccccgnntaccccntcnntcancccannnccatcngg

SEQ ID NO: 476 - DNA, 1036 bp, Homo sapiens
  misc_feature (768)..(768): n is a, c, g, or t
  misc_feature (777)..(777): n is a, c, g, or t
  misc_feature (784)..(784): n is a, c, g, or t
  misc_feature (795)..(795): n is a, c, g, or t
  misc_feature (817)..(817): n is a, c, g, or t
  misc_feature (846)..(846): n is a, c, g, or t
  misc_feature (855)..(855): n is a, c, g, or t
  misc_feature (859)..(859): n is a, c, g, or t
  misc_feature (873)..(874): n is a, c, g, or t
  misc_feature (897)..(897): n is a, c, g, or t
  misc_feature (900)..(900): n is a, c, g, or t
  misc_feature (918)..(918): n is a, c, g, or t
  misc_feature (931)..(931): n is a, c, g, or t
  misc_feature (942)..(942): n is a, c, g, or t
  misc_feature (949)..(949): n is a, c, g, or t
  misc_feature (953)..(953): n is a, c, g, or t
  misc_feature (955)..(955): n is a, c, g, or t
  misc_feature (970)..(970): n is a, c, g, or t
  misc_feature (976)..(976): n is a, c, g, or t
  misc_feature (990)..(991): n is a, c, g, or t
  misc_feature (996)..(997): n is a, c, g, or t
  misc_feature (1002)..(1002): n is a, c, g, or t
  misc_feature (1004)..(1004): n is a, c, g, or t
  misc_feature (1006)..(1006): n is a, c, g, or t
  misc_feature (1009)..(1009): n is a, c, g, or t
  misc_feature (1014)..(1014): n is a, c, g, or t
  misc_feature (1020)..(1020): n is a, c, g, or t
  misc_feature (1023)..(1023): n is a, c, g, or t
  misc_feature (1029)..(1029): n is a, c, g, or t
  misc_feature (1033)..(1033): n is a, c, g, or t
gcccacgcgtccgcagagcatcatcagcaccgtgggccaagctttcgagctgcgcttcaagcagtacctgcacagcccgcccaaggtggcgctgcccccagaaaggctggcagggccggaggagtcggcctggggggacgaggaggactctttggagcacaattactacaacagcatcccggggaaggagccgccgctgggcgggctagtggactccaggctggccctgacacagccctgcgccctcacggccctcgaccagggcccatctccttctctaagagatgcctgcagcctgccatgggacgtggggtccaccggtacaggaccagtggcccagcccccctacccgccgggcccctgtggcccccacggaggaacagctgcgtcaggagccctggtaccacggccggatgagccgccgggcggcagagaggatgcttcgagctgacggggacttccttgtgcgagacagcgtcaccaaccccgggcagtatgtcctcaccggcatgcacgccgggcagcccaagcacctgctgctcgtggaccccgagggcgtggtacggacgaaggacgtgctgtttgagagcatcagccacctgatcgaccaccacctgcagaacgggcagcccatcgtggccgccgagagtgagctgcacctgcgtggcgtggtctcacgggagccctgagccaggtgaccgttctcagccctggctcctgcctgttctcagccccagctcctgcctgtcatggccttggggctctcanccctcctcntggatcntggtcaggccnaaacaccgctgcctctcctttnttcgcatgaacctctggcatggtctttcntcaactggncccngggctgggcaaaannttcttcttgccggggccccttgnccnaccccctcttttgcctgnagtgagggtgttnatacaaaaaanggaaacntttncnccttttaaaaaaaanaattcnaaaaacaacccctnncttcnnaaccntngnccnggggntccccntcncccctnggtnggt

SEQ ID NO: 477 - DNA, 1009 bp, Homo sapiens
  misc_feature (673)..(673): n is a, c, g, or t
  misc_feature (737)..(737): n is a, c, g, or t
  misc_feature (739)..(739): n is a, c, g, or t
  misc_feature (770)..(770): n is a, c, g, or t
  misc_feature (784)..(784): n is a, c, g, or t
  misc_feature (854)..(854): n is a, c, g, or t
  misc_feature (860)..(860): n is a, c, g, or t
  misc_feature (883)..(883): n is a, c, g, or t
  misc_feature (895)..(895): n is a, c, g, or t
  misc_feature (904)..(904): n is a, c, g, or t
  misc_feature (911)..(912): n is a, c, g, or t
  misc_feature (916)..(916): n is a, c, g, or t
  misc_feature (919)..(919): n is a, c, g, or t
  misc_feature (921)..(921): n is a, c, g, or t
  misc_feature (926)..(926): n is a, c, g, or t
  misc_feature (947)..(947): n is a, c, g, or t
  misc_feature (966)..(966): n is a, c, g, or t
  misc_feature (970)..(970): n is a, c, g, or t
  misc_feature (975)..(975): n is a, c, g, or t
  misc_feature (980)..(980): n is a, c, g, or t
  misc_feature (983)..(983): n is a, c, g, or t
  misc_feature (986)..(986): n is a, c, g, or t
  misc_feature (990)..(990): n is a, c, g, or t
  misc_feature (1008)..(1009): n is a, c, g, or t
ggccgccctcgccatggccgcgccggccccgggcctcatctcggtgttctcgagttcccaggagctgggtgcggcgctagcgcagctggtggcccagcgcgcagcatgctgcctggcaggggcccgcgcccgtttcgcgctcggcttgtcgggcgggagcctcgtctcgatgctagcccgcgagctacccgccgccgtcgcccctgccgggccagctagcttagcgcgctggacgctgggcttctgcgacgagcgcctcgtgcccttcgatcacgccgagagcacgtacggcctctaccggacgcatcttctctccagactgccgatcccagaaagccaggtgatcaccattaaccccgagctgcctgtggaggaggcggctgaggactacgccaagaagctgagacaggcattccaaggggactccatcccggttttcgacctgctgatcctgggggtgggccccgatggtcacacctgctcactcttcccagaccaccccctcctacaggagcgggagaagattgtggctcccatcagtgactccccgaagccaccgccacagcgtgtgaccctcacgctacctgtcctgaatgcagcacgaactgtcatctttgtggcaactggagaaggcaaggcagctgttctgaagcgcattttggaggaccaggangaaaacccgctgcccgccgccctggtccagccccacaccgggaaactgtgctggttcttggacnangcggccgctccctatagtgagtcgtattaancttaattaactgancttggactcctgttgataaatccagtaatgacctcaaaactccatctggatttgttcaaaaacgctcggnttgccnccgggcgtttttttattggtganaatccaagctancttggcganatttttnngaanctnanggaanctaaaaatggaaaaaaaaaantccctggaaaaaaccaccngttnaaaanatccnaanggnatcntaaaaaaaattttgaagnn

SEQ ID NO: 478 - DNA, 820 bp, Homo sapiens
  misc_feature (774)..(774): n is a, c, g, or t
  misc_feature (786)..(786): n is a, c, g, or t
  misc_feature (797)..(799): n is a, c, g, or t
  misc_feature (801)..(820): n is a, c, g, or t
ggtggccgtggggcgggtatgggactagctggcgtgtgcgccctgagacgctcagcgggctatatactcgtcggtggggccggcggtcagtctgcggcagcggcagcaagacggtgcagtgaaggagagtgggcgtctggcggggtccgcagtttcagcagagccgctgcagccatggccccaatcaaggtgggagatgccatcccagcagtggaggtgtttgaaggggagccagggaacaaggtgaacctggcagagctgttcaagggcaagaagggtgtgctgtttggagttcctggggccttcacccctggatgttccaagacacacctgccagggtttgtggagcaggctgaggctctgaaggccaagggagtccaggtggtggcctgtctgagtgttaatgatgcctttgtgactggcgagtggggccgagcccacaaggcggaaggcaaggttcggctcctggctgatcccactggggcctttgggaaggagacagacttattactagatgattcgctggtgtccatctttgggaatcgacgtctcaagaggttctccatggtggtacaggatggcatagtgaaggccctgaatgtggaaccagatggcacaggcctcacctgcagcctggcacccaatatcatctcacagctctgaggccctgggccagattacttcctccacccctccctatctcacctgcccagccctgtgctggggccctgcaattggaatgttggccagatttctgcaataaacacttgtggntttgcggcccanaaaaaaaaaannnannnnnnnnnnnnnnnnnnnn

SEQ ID NO: 479 - DNA, 1149 bp, Homo sapiens
  misc_feature (822)..(822): n is a, c, g, or t
  misc_feature (824)..(824): n is a, c, g, or t
  misc_feature (854)..(854): n is a, c, g, or t
  misc_feature (858)..(858): n is a, c, g, or t
  misc_feature (871)..(871): n is a, c, g, or t
  misc_feature (879)..(879): n is a, c, g, or t
  misc_feature (888)..(888): n is a, c, g, or t
  misc_feature (908)..(908): n is a, c, g, or t
  misc_feature (919)..(919): n is a, c, g, or t
  misc_feature (926)..(926): n is a, c, g, or t
  misc_feature (934)..(934): n is a, c, g, or t
  misc_feature (938)..(938): n is a, c, g, or t
  misc_feature (940)..(940): n is a, c, g, or t
  misc_feature (960)..(960): n is a, c, g, or t
  misc_feature (968)..(968): n is a, c, g, or t
  misc_feature (980)..(980): n is a, c, g, or t
  misc_feature (989)..(989): n is a, c, g, or t
  misc_feature (996)..(996): n is a, c, g, or t
  misc_feature (998)..(999): n is a, c, g, or t
  misc_feature (1017)..(1017): n is a, c, g, or t
  misc_feature (1026)..(1026): n is a, c, g, or t
  misc_feature (1048)..(1048): n is a, c, g, or t
  misc_feature (1061)..(1061): n is a, c, g, or t
  misc_feature (1067)..(1067): n is a, c, g, or t
  misc_feature (1074)..(1074): n is a, c, g, or t
  misc_feature (1081)..(1081): n is a, c, g, or t
  misc_feature (1092)..(1092): n is a, c, g, or t
  misc_feature (1101)..(1101): n is a, c, g, or t
  misc_feature (1106)..(1106): n is a, c, g, or t
  misc_feature (1112)..(1112): n is a, c, g, or t
  misc_feature (1117)..(1118): n is a, c, g, or t
  misc_feature (1129)..(1129): n is a, c, g, or t
  misc_feature (1131)..(1131): n is a, c, g, or t
  misc_feature (1137)..(1137): n is a, c, g, or t
  misc_feature (1139)..(1140): n is a, c, g, or t
  misc_feature (1144)..(1144): n is a, c, g, or t
  misc_feature (1147)..(1147): n is a, c, g, or t
gggcggattcatactggtgagaaaccttatgaatgcaaagcatgtggaatggcctttagcagtggttcggctcttactcggcatcagagaattcataccggtgagaaaccatatatatgtaatgaatgtggtaaggcctttagttttggatcagcccttactcgacatcaaagaattcatactggtgagaaaccttatgtatgtaaggaatgtgggaaggcttttaatagtggctcagatctcactcagcatcagagaattcacactggtgagaaaccctatgagtgtaaggagtgtgagaaagcctttagaagtggttcaaaacttattcagcatcaaagaatgcatactggagagaaaccttatgaatgtaaggaatgtgggaagacctttagtagtggttcagaccttactcaacatcacagaattcatactggtgagaaaccctatgaatgtaaggaatgtgggaaggcctttggtagtggctcaaaacttatccaacaccagctaatccatactggtgaaagaccctatgaatgtaaagaatgtggaaagtcctttagtagtggttcagctcttaatcggcaccagagaatacacactggtgagaaaccctatgaatgtaaggagtgtgggaaggctttttatagtggctcaagccttactcagcatcagagaattcatacaggtgagaaactttatgaatgtaagaactgtggggaaggcttatgggagggattcagagtttcagcaacataagaaaagtcataatggtaagaaactctgcgaattggaactataatttgaattatgtgctgaagnangactctaaacatatgacttaagaaaattcntagnggtgaaaatctcnacaaatanaactaaggnacaaatgccttacttatgcntcccaggttantccgtcnaaaaaatntttntnccggaaaaaaatcccccccnaataaaanaaaaatttgaanaacccttanccaaatncnntccctccatacctttggnaaaattctnacctggggaaggttaaaaatgnaaaaaaaaacccntttatnaaatttngcccccncctttaaaacntgggaaaanccccntttccnggggnnaaccccccaanantttttncnngggnccntt

SEQ ID NO: 480 - DNA, 1008 bp, Homo sapiens
  misc_feature (784)..(784): n is a, c, g, or t
  misc_feature (801)..(801): n is a, c, g, or t
  misc_feature (809)..(809): n is a, c, g, or t
  misc_feature (813)..(813): n is a, c, g, or t
  misc_feature (817)..(817): n is a, c, g, or t
  misc_feature (821)..(821): n is a, c, g, or t
  misc_feature (841)..(841): n is a, c, g, or t
  misc_feature (899)..(899): n is a, c, g, or t
  misc_feature (908)..(908): n is a, c, g, or t
  misc_feature (910)..(910): n is a, c, g, or t
  misc_feature (919)..(919): n is a, c, g, or t
  misc_feature (922)..(922): n is a, c, g, or t
  misc_feature (924)..(924): n is a, c, g, or t
  misc_feature (926)..(926): n is a, c, g, or t
  misc_feature (940)..(940): n is a, c, g, or t
  misc_feature (958)..(958): n is a, c, g, or t
  misc_feature (962)..(962): n is a, c, g, or t
  misc_feature (993)..(994): n is a, c, g, or t
  misc_feature (997)..(997): n is a, c, g, or t
  misc_feature (1001)..(1001): n is a, c, g, or t
  misc_feature (1004)..(1004): n is a, c, g, or t
  misc_feature (1007)..(1008): n is a, c, g, or t
gccccaccgagacagaggctgaagcaggtgtccgcggggcagacgtcggtgtatgccctggatgagaatggaaacctgtggtatcgccaagggatcacgcccagctacccgcagggctccagctgggagcacgtgtccaacaacgtgtgccgagtgtccgtggggcccctggaccaggtctgggtgatcgccaacaaagtgcagggcagccacagcctgagccgggggacagtgtgtcatcgcaccggcgtgcagcctcacgagcccaagggccacggctgggactacggcatcgggggaggctgggaccatatctctgtccgggccaatgccaccagggccccccggagctcgtcccaggagcaggagccgagtgccccaccagaggcccatggccccgtctgctgctgaggcccccccacacacctacatgcagggacggtgcccagtttgggggatcaaggctgagccattcttgtgctggagtgtgcaccgtgggagcaatgtggcccaggactagaaccgggaacctggagccctccgggaacgccggccctggggcagcagagccaggatggagccctcctgagctggcatctcagacagcacccgggcccgccacccctcaccaagagagatggccatggggctcagggcctctttaccatgtgcagtgaccatttctcagagcaggacttgcaaagaggctttaatttcaaaagtgaaggaaggaggccaggcgccgtggctcacgcctgtaatcccagcactttgggaggctgangtgggcaaatcacctangtcaagantttnaaanccanacgggccaacatggtgaaancccatctctactaaaaatacaaaaaaaaaaaattaactgggccatggtggtgggtgcntgtaatccnanctactcggnagntnangcagaaaatctttnaacccggaagcgaagctncatnaaccaaatattccattgcactccacctgggnnaanaaantcnttnn

SEQ ID NO: 481 - DNA, 1108 bp, Homo sapiens
  misc_feature (807)..(807): n is a, c, g, or t
  misc_feature (837)..(837): n is a, c, g, or t
  misc_feature (860)..(860): n is a, c, g, or t
  misc_feature (875)..(875): n is a, c, g, or t
  misc_feature (933)..(933): n is a, c, g, or t
  misc_feature (937)..(937): n is a, c, g, or t
  misc_feature (942)..(942): n is a, c, g, or t
  misc_feature (965)..(966): n is a, c, g, or t
  misc_feature (988)..(988): n is a, c, g, or t
  misc_feature (997)..(997): n is a, c, g, or t
  misc_feature (1027)..(1027): n is a, c, g, or t
  misc_feature (1036)..(1036): n is a, c, g, or t
  misc_feature (1038)..(1038): n is a, c, g, or t
  misc_feature (1043)..(1043): n is a, c, g, or t
  misc_feature (1053)..(1053): n is a, c, g, or t
  misc_feature (1057)..(1057): n is a, c, g, or t
  misc_feature (1059)..(1059): n is a, c, g, or t
  misc_feature (1065)..(1065): n is a, c, g, or t
  misc_feature (1070)..(1070): n is a, c, g, or t
  misc_feature (1075)..(1075): n is a, c, g, or t
  misc_feature (1080)..(1080): n is a, c, g, or t
  misc_feature (1092)..(1108): n is a, c, g, or t
ggtgagatgctggacctagagaagcagttctcggagctaaaggagaagttgttcagggaacgactgagtcagctgcggttgcggctggaggaagtgggggctgagagagcccctgaatacacggagccccttggggggctgcagcggagcctcaagattcgcattcaggtggcagggatctacaagggcttctgtctggatgtgatcaggaataagtacgaatgtgagctgcagggagccaaacagcacctggagagtgagaagctgctgctctatgacatgctgcagggggagctgcaggagcggatccagaggctggaggaggaccgccagagcctggacctcagctctgaatggtgggacgacaaactgcacgccagaggcagctccaggtcttgggactccctgccgcccagcaagaggaagaaggcacctctggtttctggcccatacatcgtgtacatgcttcaagagatcgacatcctggaggactggacagccatcaaaaaggctagggcagctgtgtcccctcagaagagaaaatcggatggaccttgaccctgctgttcacagccagggggaccctcagagcagctggcactgcacccaggattctcgtcttcctcctgcagacaggcggacccacaggcccctcagggtctgcccagccaggctcctgtggtgctgctgggccctcccactccatctggcactggcctggactcctcctctgccctcctcgaggcctgcacagctgtggccgtggagctgacctgaccaggcaaggctgctgtctccatccctganccgcctgccacctcccactcctgaagatcnatctcttggggctcccctgacanaaaaaacagccgaantcaaaccccatcctcttgctgatgttggatgcaggctgtccggcctcaggccaggganccanttccnctgtgcgggaactctgaatcaanntgattatctgggggtctgtccncctggctgnattggaggcaaatccaggccccccagtgtntcagggaantntgggntctgcttccnaatncnaggatngaatnaaacnttctngggaaaaaaaannnnnnnnnnnnnnnnn

SEQ ID NO: 482 - DNA, 1173 bp, Homo sapiens
  misc_feature (2)..(2): n is a, c, g, or t
  misc_feature (4)..(10): n is a, c, g, or t
  misc_feature (12)..(12): n is a, c, g, or t
  misc_feature (15)..(15): n is a, c, g, or t
  misc_feature (835)..(835): n is a, c, g, or t
  misc_feature (838)..(838): n is a, c, g, or t
  misc_feature (845)..(845): n is a, c, g, or t
  misc_feature (859)..(859): n is a, c, g, or t
  misc_feature (883)..(883): n is a, c, g, or t
  misc_feature (890)..(890): n is a, c, g, or t
  misc_feature (905)..(905): n is a, c, g, or t
  misc_feature (954)..(954): n is a, c, g, or t
  misc_feature (977)..(977): n is a, c, g, or t
  misc_feature (986)..(986): n is a, c, g, or t
  misc_feature (1004)..(1004): n is a, c, g, or t
  misc_feature (1007)..(1007): n is a, c, g, or t
  misc_feature (1030)..(1030): n is a, c, g, or t
  misc_feature (1032)..(1032): n is a, c, g, or t
  misc_feature (1051)..(1051): n is a, c, g, or t
  misc_feature (1055)..(1055): n is a, c, g, or t
  misc_feature (1069)..(1069): n is a, c, g, or t
  misc_feature (1077)..(1077): n is a, c, g, or t
  misc_feature (1085)..(1085): n is a, c, g, or t
  misc_feature (1102)..(1102): n is a, c, g, or t
  misc_feature (1105)..(1105): n is a, c, g, or t
  misc_feature (1107)..(1107): n is a, c, g, or t
  misc_feature (1112)..(1112): n is a, c, g, or t
  misc_feature (1115)..(1115): n is a, c, g, or t
  misc_feature (1117)..(1117): n is a, c, g, or t
  misc_feature (1127)..(1127): n is a, c, g, or t
  misc_feature (1134)..(1134): n is a, c, g, or t
  misc_feature (1136)..(1136): n is a, c, g, or t
  misc_feature (1139)..(1139): n is a, c, g, or t
  misc_feature (1146)..(1146): n is a, c, g, or t
  misc_feature (1155)..(1156): n is a, c, g, or t
  misc_feature (1158)..(1159): n is a, c, g, or t
  misc_feature (1166)..(1166): n is a, c, g, or t
  misc_feature (1169)..(1169): n is a, c, g, or t
tntnnnnnnngnatnagaggaaattactatgagaggatcgcatcaccatcaccatcacggatcctatttaggtgacactatagaatcgtcgacccacgcgatccgaaattggtctgctgtctgaagaggtagaattatatggtgaaacaaaggccaaagttctgctgtcagcactagaacgcctgaagcaccggcctgatgggaaatacgtggtggtgactggaataactccaacacccctgggagaagggaaaagcacaactacaatcgggctagtgcaagcccttggtgcccatctctaccagaatgtctttgcgtgtgtgcgacagccttctcagggccccacctttggaataaaaggtggcgctgcaggaggcggctactcccaggtcattcctatggaagagtttaatctccacctcacaggtgacatccatgccatcactgcagctaataacctcgttgctgcggccattgatgctcggatatttcatgaactgacccagacagacaaggctctctttaatcgtttggtgccatcagtaaatggagtgagaaggttctctgacatccaaatccgaaggttaaagagactaggcattgaaaagactgaccctaccacactgacagatgaagagataaacagatttgcaagattggacattgatccagaaaccataacttggcaaagagtgttggataccaatgatagattcctgaggaagatcacgattggacaggctccaacggagaagggtcacacacggacggcccagtttgatatctctgtggccagtgaaaattatggctgtcctggctctcaccacttctctanaanacatganaaagagactgggcnaaaatggtggtggcatccagtaanaaagganagcccgtcagtgccnaaaatctggggggtgagtggtgcactgacagtgcttatgaaggaacgcnaatcaagccccaatctcatgcanaaactggangggcactccagtgtttgnccntgctggcccgtttgccaacatcncncatgggaattcctccaccnttgnaaaccaaaatcccnctccaacnttgttggncccaaaagggtttgtantgncngaaanccngnatttggaacnaaaattngnaanggaaaanttttttaanntnnaaaggcnggnattc

SEQ ID NO: 483 - DNA, 1038 bp, Homo sapiens
  misc_feature (764)..(764): n is a, c, g, or t
  misc_feature (783)..(783): n is a, c, g, or t
  misc_feature (807)..(807): n is a, c, g, or t
  misc_feature (828)..(828): n is a, c, g, or t
  misc_feature (857)..(857): n is a, c, g, or t
  misc_feature (883)..(883): n is a, c, g, or t
  misc_feature (888)..(888): n is a, c, g, or t
  misc_feature (934)..(934): n is a, c, g, or t
  misc_feature (952)..(952): n is a, c, g, or t
  misc_feature (955)..(955): n is a, c, g, or t
  misc_feature (959)..(959): n is a, c, g, or t
  misc_feature (964)..(965): n is a, c, g, or t
  misc_feature (971)..(971): n is a, c, g, or t
  misc_feature (986)..(987): n is a, c, g, or t
  misc_feature (993)..(994): n is a, c, g, or t
  misc_feature (1006)..(1006): n is a, c, g, or t
  misc_feature (1012)..(1012): n is a, c, g, or t
  misc_feature (1021)..(1022): n is a, c, g, or t
  misc_feature (1025)..(1025): n is a, c, g, or t
  misc_feature (1028)..(1028): n is a, c, g, or t
  misc_feature (1034)..(1034): n is a, c, g, or t
  misc_feature (1037)..(1037): n is a, c, g, or t
ggggcgcgggagctgcaggggtttctcgatggcgtcaagaagggccaggagcaggtgctgggggacctgtccatgatcctgtgtgaccccttcgccatcaacacgctggcactgagcacagtcaggcacctgcaggagctggtcggccaggagacactgcccagggacagccccgacctcctgctgctgctccggctgctggcgctgggccagggagcctgggacatgatcgacagccaggtcttcaaggagcccaagatggaggtagagctcatcaccaggttcctcccgatgctcatgtccttcctggtggatgactacactttcaatgtggatcagaaacttccggctgaggagaaagccccagtctcatatccaaacacacttcccgaaagcttcactaagtttctgcaggagcagcgcatggcctgcgaggtggggctgtactacgtcctgcacatcaccaagcagaggaacaagaacgcgctcctccgcctgctgcccgggctggtggagacctttggcgacttggcctttggcgacatcttcctccacctgctcacgggcaaccttgcgctgctggccgacgaatttgcccttgaggacttctgcagcagcctcttcgatggcttcttcctcaccgcctctccaaggaaggagaacgtgcaccggcacgcgctgcggctcctcattcacctgcaccccagggtggccccgtctaagctggaggcgttgcaaaaggccctggagcctacaggccaaancggaaaggcagtgaagganctttactcccagctcggcgagaanctggaacagctggatcaccgnaagcccagcccggcacaggctgcggaaancccggccttggaactgcccctcccancgtgnccgcccctgccccgctctaaggccctcaaactgctcggtgctgggncatgccaatccggcctgncanccgnaaaanntcccgnactgaatttaaaggnnattttnnttccggggctanggtggnctttctgcnntanggnccctgnttnt

SEQ ID NO: 484 - DNA, 1022 bp, Homo sapiens
  misc_feature (775)..(775): n is a, c, g, or t
  misc_feature (821)..(821): n is a, c, g, or t
  misc_feature (853)..(853): n is a, c, g, or t
  misc_feature (878)..(878): n is a, c, g, or t
  misc_feature (899)..(899): n is a, c, g, or t
  misc_feature (917)..(917): n is a, c, g, or t
  misc_feature (925)..(925): n is a, c, g, or t
  misc_feature (935)..(935): n is a, c, g, or t
  misc_feature (944)..(945): n is a, c, g, or t
  misc_feature (950)..(950): n is a, c, g, or t
  misc_feature (955)..(955): n is a, c, g, or t
  misc_feature (962)..(962): n is a, c, g, or t
  misc_feature (975)..(975): n is a, c, g, or t
  misc_feature (987)..(987): n is a, c, g, or t
  misc_feature (990)..(990): n is a, c, g, or t
  misc_feature (996)..(996): n is a, c, g, or t
  misc_feature (999)..(999): n is a, c, g, or t
  misc_feature (1004)..(1004): n is a, c, g, or t
  misc_feature (1008)..(1008): n is a, c, g, or t
  misc_feature (1010)..(1011): n is a, c, g, or t
  misc_feature (1014)..(1014): n is a, c, g, or t
  misc_feature (1017)..(1017): n is a, c, g, or t
  misc_feature (1019)..(1019): n is a, c, g, or t
  misc_feature (1021)..(1021): n is a, c, g, or t
gcccagacgttcgctgagcggcgcgagcggagcttcagccggtcctggagcgaccccacccccatgaaagccgacacttcccacgactcccgagacagcagtgacctgcagagctcccactgcacgctggacgaggccttcgaggacctggactgggacactgagaagggcctggaggctgtggcctgcgacaccgaaggcttcgtgccaccaaaggtcatgctcatttcctccaaggtgcccaaggctgagtacatccccactatcatccgccgggatgacccctccatcatccccatcctctacgaccatgagcacgcaaccttcgaggacatccttgaggagatagagaggaagctgaacgtctaccacaagggagccaagatctggaaaatgctgattttctgccagggaggtcctggacacctctatctcctcaagaacaaggtggccacctttgccaaagtggagaaggaagaggacatgattcacttctggaagcggctgagccgcctgatgagcaaagtgaacccagagccgaacgtcatccacatcatgggctgctacattctggggaaccccaatggagagaagctgttccagaacctcaggaccctcatgactccttatagggtcaccttcgagtcacccctggagctctcagcccaagggaagcagatgatcgagacgtactttgacttccggttgtatcgcctgtggaagagccgccagcactcgaagctgctggactttgacgacgtcctgtgaggggcanaggcctccgcccagtcaccatcaggccactccctctgcaccggganctggggctgggccgcctcgtgctccccgggantgtgtggctccggtctcgcctgganccacttcagggcacctcaaangttgctcaggttcccccnggggggtncgggtcctcnctgcacccnnggccncaaangctgcantccctgggggccnggaagaatcccnccntggggnccngggangctnannggncangnant

SEQ ID NO: 485 - DNA, 1165 bp, Homo sapiens
  misc_feature (861)..(861): n is a, c, g, or t
  misc_feature (866)..(866): n is a, c, g, or t
  misc_feature (896)..(896): n is a, c, g, or t
  misc_feature (916)..(916): n is a, c, g, or t
  misc_feature (925)..(925): n is a, c, g, or t
  misc_feature (937)..(937): n is a, c, g, or t
  misc_feature (942)..(942): n is a, c, g, or t
  misc_feature (952)..(952): n is a, c, g, or t
  misc_feature (956)..(956): n is a, c, g, or t
  misc_feature (969)..(969): n is a, c, g, or t
  misc_feature (973)..(973): n is a, c, g, or t
  misc_feature (975)..(975): n is a, c, g, or t
  misc_feature (985)..(985): n is a, c, g, or t
  misc_feature (988)..(988): n is a, c, g, or t
  misc_feature (1007)..(1007): n is a, c, g, or t
  misc_feature (1011)..(1011): n is a, c, g, or t
  misc_feature (1016)..(1016): n is a, c, g, or t
  misc_feature (1020)..(1020): n is a, c, g, or t
  misc_feature (1029)..(1030): n is a, c, g, or t
  misc_feature (1043)..(1043): n is a, c, g, or t
  misc_feature (1050)..(1050): n is a, c, g, or t
  misc_feature (1054)..(1056): n is a, c, g, or t
  misc_feature (1058)..(1058): n is a, c, g, or t
  misc_feature (1065)..(1066): n is a, c, g, or t
  misc_feature (1079)..(1079): n is a, c, g, or t
  misc_feature (1082)..(1082): n is a, c, g, or t
  misc_feature (1084)..(1084): n is a, c, g, or t
  misc_feature (1098)..(1098): n is a, c, g, or t
  misc_feature (1100)..(1100): n is a, c, g, or t
  misc_feature (1111)..(1112): n is a, c, g, or t
  misc_feature (1116)..(1116): n is a, c, g, or t
  misc_feature (1129)..(1129): n is a, c, g, or t
  misc_feature (1141)..(1141): n is a, c, g, or t
  misc_feature (1153)..(1153): n is a, c, g, or t
  misc_feature (1158)..(1158): n is a, c, g, or t
  misc_feature (1165)..(1165): n is a, c, g, or t
ggcactccagctaccgaagcactggagagtgtcatggaggcctacgagcaggtccaaaagggacccctgaagctgaaaggcgtcgcagagctgggagtgaccaagcggaagaagaaaaagaaggacaaagacaaagcgaaactcctggaagcaatgggaacgagcaaaaagaacgaggaggagaagcggcgcggcctggacaagcggaccccggcccaggcggccttcgagaaaatgcaggagaagcggcaaatggaaaggatcctaaagaaggcatccaaaacccacaagcagagagtggaggacttcaacagacacctggacacactcacggagcattacgacattcccaaagtcagctggacgaagtagccgcctgcccccagtatggagcagcatcgagggttcgcaaaaggccacactggggttgtgtgtgtttcctttggtatattctggaaacatggctacacacacccttgcatcttctgctacagactgcttttcgaagctgtgtaccctcattctggaacttgattaaagtaagatcgtccttgtactcagtttaggcttcttggcaacatacagaagatacacccttttcgtttggatggaaagtttctaagtttatccagaggtaaagcccattgtgtgtctgtgtcatgtaaaaatgttttcacccgagttgcatgtaacgctctgaggccagccagctgtcttctcctggatgagacagactccagagggtaaggagctagcgccatggtggcctgcagtatgcagagccccgcaggacccagcgtgggcgcccttccagcttcctctagctttgggcctatgctgtcccctgcaggccctagggangcccnttgcaactatgcggccttcaaacttcctcntcagccacctggccactganacagcatancctgggtaacgnaacanccccttaagncaanaatggaacggaancccntngctctttttnaanccgttttccaaaacccccnttcnggtgntttnatgggggtnncctaacaaacctnctaatgntccnnncnttttttnnaatggaaccaaanaancntgcttttaattctnanttgggggttcnnaaanccctttttttttnccaatttacccnccccaattctgnttggntttcccn

SEQ ID NO: 486 - DNA, 915 bp, Homo sapiens
  misc_feature (205)..(205): n is a, c, g, or t
  misc_feature (532)..(532): n is a, c, g, or t
  misc_feature (638)..(638): n is a, c, g, or t
  misc_feature (667)..(667): n is a, c, g, or t
  misc_feature (702)..(702): n is a, c, g, or t
  misc_feature (717)..(717): n is a, c, g, or t
  misc_feature (730)..(730): n is a, c, g, or t
  misc_feature (734)..(734): n is a, c, g, or t
  misc_feature (746)..(746): n is a, c, g, or t
  misc_feature (751)..(751): n is a, c, g, or t
  misc_feature (767)..(767): n is a, c, g, or t
  misc_feature (774)..(774): n is a, c, g, or t
  misc_feature (781)..(781): n is a, c, g, or t
  misc_feature (785)..(785): n is a, c, g, or t
  misc_feature (787)..(787): n is a, c, g, or t
  misc_feature (792)..(792): n is a, c, g, or t
  misc_feature (798)..(798): n is a, c, g, or t
  misc_feature (800)..(800): n is a, c, g, or t
  misc_feature (805)..(805): n is a, c, g, or t
  misc_feature (808)..(808): n is a, c, g, or t
  misc_feature (826)..(826): n is a, c, g, or t
  misc_feature (831)..(831): n is a, c, g, or t
  misc_feature (835)..(836): n is a, c, g, or t
  misc_feature (851)..(851): n is a, c, g, or t
  misc_feature (857)..(857): n is a, c, g, or t
  misc_feature (863)..(863): n is a, c, g, or t
  misc_feature (873)..(873): n is a, c, g, or t
  misc_feature (881)..(881): n is a, c, g, or t
  misc_feature (883)..(884): n is a, c, g, or t
  misc_feature (895)..(896): n is a, c, g, or t
  misc_feature (900)..(900): n is a, c, g, or t
  misc_feature (904)..(904): n is a, c, g, or t
  misc_feature (914)..(914): n is a, c, g, or t
gcccacgcgtccggagccgcctcttggggccaccaaggacagggccatgttctgtccccccagagctggtcttgggatggccgtgtgacaggcatgctccacccctccagcttcgtcctggggcagggctccctccaagcctgtctccccactccccggccagaggtcagcaaccacagaaggccccccagaccacgcatggcanaccaggctgcagtggcagccctgaggtgccccccgccgagtcccagggccctgcaggggcctcgacaggagccgggcctatctctaaagcagagggaatggctgggcatgaacttcgacattccaaaaccccaagccaggaaaaagggcagggcctggtcctagggatgcttactggcagcaagagcagtgcccagtcagggtgggaggtagcaccaggctctgtgaccctcacccaagtgggggggtggtcagtggaagctggggaggcttcactcagctcaaccctgcagaccccccatatgagaacccccctcctcccaccagntgggggagatgacatcactgctctctccatggggagggggctcacagggcaccaagttcgggatcctaggactggcaggacctgctggagcctgaaatgggccccnaggggcctgaggttgccttcctccctgtncagaacccaacccttggacacctccccaaaactgncaaagggtcccttancatgggcccccanaagnccccccaggggntgggnagttttccaatctaangaagggntgccttntaangnccccnactttntnaaggnttnggaatgaaaaaaggcaanaattntggnnctctggcaaagggtnaaactntttttntgggatgggnaagggccncnncccccgaaaannaagngaanaaggtgcccna

SEQ ID NO: 487 - DNA, 1006 bp, Homo sapiens
  misc_feature (807)..(807): n is a, c, g, or t
  misc_feature (841)..(841): n is a, c, g, or t
  misc_feature (883)..(883): n is a, c, g, or t
  misc_feature (891)..(892): n is a, c, g, or t
  misc_feature (915)..(915): n is a, c, g, or t
  misc_feature (920)..(920): n is a, c, g, or t
  misc_feature (923)..(923): n is a, c, g, or t
  misc_feature (942)..(942): n is a, c, g, or t
  misc_feature (948)..(948): n is a, c, g, or t
  misc_feature (952)..(952): n is a, c, g, or t
  misc_feature (958)..(960): n is a, c, g, or t
  misc_feature (964)..(964): n is a, c, g, or t
  misc_feature (967)..(967): n is a, c, g, or t
  misc_feature (981)..(981): n is a, c, g, or t
  misc_feature (990)..(990): n is a, c, g, or t
  misc_feature (1000)..(1000): n is a, c, g, or t
  misc_feature (1002)..(1002): n is a, c, g, or t
  misc_feature (1004)..(1004): n is a, c, g, or t
  misc_feature (1006)..(1006): n is a, c, g, or t
gcccacgcgtccgcccacgcgtccgggaagcattcagcatctgcccttgtcctccatggtcacaaccagaactgtgactgtagcccggacatcaccttgaagatacagtttttgaggcttcttcagagcttcagtgaccaccacgagaacaagtacttgttactcaacaaccaggagctgaatgaactcagtgccatctctctcaaggccaacatccctgaggtggaagctgtcctcaacaccgacaggagtttggtgtgtgatgggaagaggggcttattaactcgtctgctgcaggtcatgaagaaggagccagcagagtcgtctttcaggttttggcaagctcgggctgtggagagtttcctccgagggaccacctcctatgcagaccagatgttcctgctgaagcgaggcctcttggagcacatcctttactgcattgtggacagcgagtgtaagtcaagggatgtgctccagagttactttgacctcctgggggagctgatgaagttcaacgttgatgcattcaagagattcaataaatatatcaacaccgatgcaaagttccaggtattcctgaagcagatcaacagctccctggtggactccaacatgctggtgcgctgtgtcactctgtccctggaccgatttgaaaaccaggtggatatgaaagttgccgaggtactgtctgaatgccgcctgctcgcctacatatcccaggtgcccacgcagatgtccttcctcttccgcctcatcaaatcatccacgtgcagacgctgacccaaggagaacgtcagctgcctcaanaccagcctggtgatcctgaatgctggccccgacngaaaaaacgggctgccccctgtacctgcggctgctgcaccgnatggaccnnaccaaaaagtaccccggctttcntgctnaanaacttccaaaacctggtgngctttntggnagcacnnntacntgnccaaggaaaagganagcaccttncctaaaaaanantncn

SEQ ID NO: 488 - DNA, 1087 bp, Homo sapiens
  misc_feature (710)..(710): n is a, c, g, or t
  misc_feature (789)..(789): n is a, c, g, or t
  misc_feature (807)..(807): n is a, c, g, or t
  misc_feature (813)..(813): n is a, c, g, or t
  misc_feature (828)..(828): n is a, c, g, or t
  misc_feature (845)..(845): n is a, c, g, or t
  misc_feature (889)..(889): n is a, c, g, or t
  misc_feature (891)..(891): n is a, c, g, or t
  misc_feature (930)..(930): n is a, c, g, or t
  misc_feature (934)..(934): n is a, c, g, or t
  misc_feature (947)..(947): n is a, c, g, or t
  misc_feature (954)..(954): n is a, c, g, or t
  misc_feature (968)..(968): n is a, c, g, or t
  misc_feature (972)..(972): n is a, c, g, or t
  misc_feature (980)..(980): n is a, c, g, or t
  misc_feature (989)..(989): n is a, c, g, or t
  misc_feature (998)..(998): n is a, c, g, or t
  misc_feature (1012)..(1012): n is a, c, g, or t
  misc_feature (1014)..(1015): n is a, c, g, or t
  misc_feature (1017)..(1017): n is a, c, g, or t
  misc_feature (1023)..(1023): n is a, c, g, or t
  misc_feature (1026)..(1026): n is a, c, g, or t
  misc_feature (1032)..(1032): n is a, c, g, or t
  misc_feature (1044)..(1045): n is a, c, g, or t
  misc_feature (1050)..(1050): n is a, c, g, or t
  misc_feature (1066)..(1066): n is a, c, g, or t
  misc_feature (1069)..(1069): n is a, c, g, or t
  misc_feature (1074)..(1074): n is a, c, g, or t
  misc_feature (1076)..(1076): n is a, c, g, or t
  misc_feature (1083)..(1083): n is a, c, g, or t
gagaacaccttgctgctggggaagaaggtggtccttgtaccctacacctcggagcatgtccccaggtaccacgagtggatgaaatcagaggagctgcagcgtttgacagcctcggagccgctgaccctggagcaggagtatgccatgcagcgcagctggcaggaagatgcagacaagtgtaccttcattgtgctggatgccgagaagtggcaggcccagccaggcgccaccgaagagagctgcatggtgggagatgtgaacctcttcctcacagatctagaagacctcaccttgggggagatcgaggtcatgattgcagagcccagctgcaggggtaagggccttggcactgaggccgttctcgcgatgctgtcttacgaaacttcactttgagcaggtggctacgagcagtgtttttcaggaggtgaccctcagactgacagtgagtgagtccgagcatcagtggcttctggagcagaccagccacgtggaagagaagccttacagagatgggtcggcagagccctgctgatggctgggccttgtgggcagccactctgtgtgagcagggtgttgggcccatacacttcaaagaccagagccctgcactgggagagtgctcctggcccaggctgggaatcacctttcgaggcccttcagactctggcggggcttgctgtggcctccctccagctagtggtgtggctgancagactccagggccagggccagttcccttctcccctcccggccaaacccagacccagactctaggaagctggaatgganggcagggatccatggganatgtcnggatgaaggtggganccggaggtgcagggggnacctggaacatggatgggagtggacaggcctttctccttaaagncnaaagtgctgcctggctgggaatgaactccagccctacancttnctgatttccgttnggccggngaaaactaccaaancccnacctcaangtccctcanggcacttgntcctttttctgaangnngntgggtnacntggaanttaccggaaaannggggnccaaaggaggggccgnccncaccnangcccccnccct

SEQ ID NO: 489 - DNA, 777 bp, Homo sapiens
  misc_feature (615)..(615): n is a, c, g, or t
  misc_feature (624)..(624): n is a, c, g, or t
  misc_feature (627)..(627): n is a, c, g, or t
  misc_feature (636)..(636): n is a, c, g, or t
  misc_feature (641)..(641): n is a, c, g, or t
  misc_feature (643)..(643): n is a, c, g, or t
  misc_feature (684)..(684): n is a, c, g, or t
  misc_feature (693)..(693): n is a, c, g, or t
  misc_feature (696)..(696): n is a, c, g, or t
  misc_feature (706)..(706): n is a, c, g, or t
  misc_feature (708)..(708): n is a, c, g, or t
  misc_feature (715)..(716): n is a, c, g, or t
  misc_feature (720)..(720): n is a, c, g, or t
  misc_feature (722)..(724): n is a, c, g, or t
  misc_feature (726)..(726): n is a, c, g, or t
  misc_feature (729)..(729): n is a, c, g, or t
  misc_feature (735)..(735): n is a, c, g, or t
  misc_feature (737)..(737): n is a, c, g, or t
  misc_feature (744)..(744): n is a, c, g, or t
  misc_feature (765)..(765): n is a, c, g, or t
  misc_feature (769)..(769): n is a, c, g, or t
  misc_feature (775)..(775): n is a, c, g, or t
  misc_feature (777)..(777): n is a, c, g, or t
ggaagcggcacaccgtctcgccggacacgcgtctctggagcggtacgaaggcctggcgcacagcagcagcaagggccgggaagcccctgggcggcctccccgggctgtacccaagctgggtgtgccaccctccagccccacacacggtccagctcccgcctgtaggagcggcgcagccaaggctgtgggggcccccaagccccctgttggtggaggcaagggccgtggcctagtggctggtgggtcgcgggctctggggccttcggtgaagctgtctacggcctctgtgacgggcaggagccctggcggccctgtggcaggtcccagagcagccccacgggccgggcccagtgtcggggcgaaggctggccggggtaccgtcatgggcacaaagcaggcgctccgggctgctcacagccgcgtccatgagctgtcagccagtggagccccgggccggggtggctcctcgtggggctcggcggactcagacagcggccatgacagcggcgtgaacgtgggggaggagcggccacccacgggcccggccctgccctccccctacagcaaggtgaccgccccacggcggccccagcgctacagcagcggccatggcancgacaacancancgtgctgantggananctgccgcccgccatgggccgcaccgcccttttccaccacancggtggcancancggctatganancctgcgnncganannnangcnaccggnancgcctcntccgcccctgattcatgaacnaaantggggntn

SEQ ID NO: 490 - DNA, 1092 bp, Homo sapiens
  misc_feature (862)..(862): n is a, c, g, or t
  misc_feature (871)..(871): n is a, c, g, or t
  misc_feature (873)..(873): n is a, c, g, or t
  misc_feature (875)..(875): n is a, c, g, or t
  misc_feature (885)..(885): n is a, c, g, or t
  misc_feature (888)..(888): n is a, c, g, or t
  misc_feature (899)..(899): n is a, c, g, or t
  misc_feature (908)..(908): n is a, c, g, or t
  misc_feature (934)..(934): n is a, c, g, or t
  misc_feature (952)..(952): n is a, c, g, or t
  misc_feature (960)..(960): n is a, c, g, or t
  misc_feature (965)..(965): n is a, c, g, or t
  misc_feature (968)..(968): n is a, c, g, or t
  misc_feature (970)..(970): n is a, c, g, or t
  misc_feature (974)..(974): n is a, c, g, or t
  misc_feature (984)..(984): n is a, c, g, or t
  misc_feature (995)..(996): n is a, c, g, or t
  misc_feature (1001)..(1001): n is a, c, g, or t
  misc_feature (1005)..(1005): n is a, c, g, or t
  misc_feature (1018)..(1018): n is a, c, g, or t
  misc_feature (1022)..(1022): n is a, c, g, or t
  misc_feature (1024)..(1024): n is a, c, g, or t
  misc_feature (1027)..(1027): n is a, c, g, or t
  misc_feature (1029)..(1029): n is a, c, g, or t
  misc_feature (1039)..(1039): n is a, c, g, or t
  misc_feature (1048)..(1048): n is a, c, g, or t
  misc_feature (1050)..(1050): n is a, c, g, or t
  misc_feature (1061)..(1061): n is a, c, g, or t
  misc_feature (1067)..(1067): n is a, c, g, or t
  misc_feature (1077)..(1077): n is a, c, g, or t
  misc_feature (1084)..(1084): n is a, c, g, or t
  misc_feature (1088)..(1088): n is a, c, g, or t
gcaacaggactgaacagggagccaactgtttctttgaacagtaaatcaggaacaccaatggaccaaaatgaacacagtcactggggaccacatgcaaagggccaatgtgccagcagatctgagctgagaatcatcctggtgggcaaaacaggaactggcaaaagtgctgcagggaacagcatcctcaggaagcaagcatttgaatcgaagctgggttcccagaccttgactaagacttgcagcaaaagtcagggaagctggggaaatagagagattgtcattattgacacaccagatatgttttcttggaaggaccactgtgaagctctgtacaaagaggtgcagaggtgctacttgctgtctgcaccaggaccccatgtgctgctcctggtgactcagctgggccgctatacctcacaggaccagcaggctgcacagagggtgaaggagatctttggagaggatgccatgggacacacaattgtcctctttacccacaaggaagacctcaatggtggctccctgatggattacatgcacgactcagataacaaagccctaagcaagctggtggcagcatgtggtgggcgaatctgtgcctttaataaccgtgctgaagggagcaatcaggatgaccaagtgaaggaactaatggactgtattgaggatctgttgatggagaaaaatggtgatcactataccaatgggttgtacagcctaatacagaggtctaaatgtggacctgtgggatcagatgaaagagtaaaggaattcaaacagagccttataaagtacatggaaactcaaagaagttacacagccttggctgaagcaaactgcctaaaaggagccttaatcaaancacaactgngngntttattttgnatncagttgtttcncaaattganattctgtggctttgcatactgcacancatgggcaatttgtttgntgcttacncttanaangngcanttatctgcanttgctgttttnnacccnaaanttaatgaattttnaaancnttntnaaactaaacncaaaacccnangttaaattacnatcccnttttttttancccttcntttngggg

SEQ ID NO: 491 - DNA, 836 bp, Homo sapiens
  misc_feature (657)..(657): n is a, c, g, or t
  misc_feature (663)..(663): n is a, c, g, or t
  misc_feature (665)..(665): n is a, c, g, or t
  misc_feature (667)..(667): n is a, c, g, or t
  misc_feature (669)..(692): n is a, c, g, or t
  misc_feature (725)..(725): n is a, c, g, or t
  misc_feature (734)..(734): n is a, c, g, or t
  misc_feature (739)..(739): n is a, c, g, or t
  misc_feature (809)..(809): n is a, c, g, or t
  misc_feature (813)..(813): n is a, c, g, or t
gcgtccacactcgccgcgcgcgcggcggccgggctggaccttgctggcccgcggcgccatgagccgcagcctggactcggcgcggagcttcctggagcggctggaagcgcggggcggccgggagggggcagtcctcgccggcgagttcagcaaaaggtgtgagcggtactgggcccaggagcaggagccactgcagactgggcttttctgcatcactctgataaaggagaagtggctgaatgaggacatcatgctcaggaccctcaaggtcacattccagaaggagtcccgttctgtgtaccagctacagtatatgtcctggccagaccgtggggtccccagcagtcctgaccacatgctcgccatggtggaggaagcccgtcgcctccagggatctggccctgaacccctctgtgtccactgcaggttttggaaatgggcttcaggagggtctggtgaggcagaggggacagagcatggaggggagtacagggcatggggctagtcttgtagtctgagtgcctattttgagaacccttgctcaccctccatggactgtaattgtgagcacttgttcagcacagactcagctggggaataagcacacagctcttgctcaacaaaatgtaagtgattaaaaaggttttccttgttcanatatanananannnnnnnnnnnnnnnnnnnnnnnngggcggccgctccctatagtgagtcgtattaancttaattanctgancttggactcctgttgataaatccagtaatgacctcaaaactccatctggatttgttcaaaacgctcggtngccnccgggcgttttttattggtgaaa

SEQ ID NO: 492 - DNA, 1162 bp, Homo sapiens
  misc_feature (754)..(754): n is a, c, g, or t
  misc_feature (758)..(758): n is a, c, g, or t
  misc_feature (818)..(818): n is a, c, g, or t
  misc_feature (852)..(852): n is a, c, g, or t
  misc_feature (915)..(915): n is a, c, g, or t
  misc_feature (920)..(920): n is a, c, g, or t
  misc_feature (937)..(937): n is a, c, g, or t
  misc_feature (944)..(944): n is a, c, g, or t
  misc_feature (948)..(948): n is a, c, g, or t
  misc_feature (966)..(966): n is a, c, g, or t
  misc_feature (991)..(991): n is a, c, g, or t
  misc_feature (1000)..(1000): n is a, c, g, or t
  misc_feature (1018)..(1018): n is a, c, g, or t
  misc_feature (1023)..(1023): n is a, c, g, or t
  misc_feature (1046)..(1046): n is a, c, g, or t
  misc_feature (1052)..(1052): n is a, c, g, or t
  misc_feature (1055)..(1058): n is a, c, g, or t
  misc_feature (1069)..(1069): n is a, c, g, or t
  misc_feature (1075)..(1075): n is a, c, g, or t
  misc_feature (1079)..(1079): n is a, c, g, or t
  misc_feature (1089)..(1089): n is a, c, g, or t
  misc_feature (1091)..(1091): n is a, c, g, or t
  misc_feature (1101)..(1101): n is a, c, g, or t
  misc_feature (1106)..(1106): n is a, c, g, or t
  misc_feature (1119)..(1119): n is a, c, g, or t
  misc_feature (1127)..(1128): n is a, c, g, or t
  misc_feature (1136)..(1137): n is a, c, g, or t
  misc_feature (1149)..(1149): n is a, c, g, or t
  misc_feature (1151)..(1151): n is a, c, g, or t
  misc_feature (1155)..(1155): n is a, c, g, or t
  misc_feature (1159)..(1159): n is a, c, g, or t
gctcagaaaaaggtggaacggcagacggaacttaagcgcaaatttgaacagatgaaacaagataggatcaccagataccagggtgttaatctttatgtgaaaaatcttgatgatggtattgatgatgaacgtctccggaaagagttttctccatttggtacaatcactagtgcaaaggttatgatggagggtggtcgcagcaaagggtttggttttgtatgtttctcctccccagaagaagccactaaagcagttacagaaatgaacggtagaattgtggccacaaagccattgtatgtagctttagctcagcgcaaagaagagcgccaggctcacctcactaaccagtatatgcagagaatggcaagtgtacgagctgttcccaaccctgtaatcaacccctaccagccagcacctccttcaggttacttcatggcagctatcccacagactcagaaccgtgctgcatactatcctcctagccaaattgctcaactaagaccaagtcctcgctggactgctcagggtgccagacctcatccattccaaaatatgcccggtgctatccgcccagctgctcctagaccaccatttagtactatgagaccagcttcttcacaggttccacgagtcatgtcaacacagcgtgttgctaacacatcaacacagacaatgggtccacgtcctgcagctgcagccgctgcagctactcctgctgtccgcaccgttccacagtataaatatgctgcagganttcncaatcctcagcaacatcttaatgcacagccacaagttacaatgcaacagcctgctgttcntgtacaaggtcaggaaccttttgactggcttccntgttggcatcctgcccctcctccagaaccaaaacaaatgtttgggtggaacggctgttttccncttantccagcctgccccctantcttggntggnaaaatccctggcaagttngttgggaaattgaaaatttcaaaantctttcatnagccccaagtccccaaantcccncccgttctaaggtgaaaaaactntaactnttnnnnagccccccaanctaaanaggncgcccaaaancnttaaaagggnccccngggtttccactgnttaaattnncgggaccnngaaaaaaaactngncttnccanaaa

SEQ ID NO: 493 - DNA, 797 bp, Homo sapiens
gcccacgcgtccgcccacgcgtccgcccacgcgtccggctgcagctcgggacttcggcctgacccagcccccatggcttcagaagagctacagaaagatctagaagaggtaaaggtgttgctggaaaaggctactaggaaaagagtacgtgatgcccttacagctgaaaaatccaagattgagacagaaatcaagaacaagatgcaacagaaatcacagaagaaagcagaacttcttgataatgaaaaaccagctgctgtggttgctcccattacaacgggctatacggtgaaaatcagtaattatggatgggatcagtcagataagtttgtgaaaatctacattaccttaactggagttcatcaagttcccactgagaatgtgcaggtgcatttcacagagaggtcatttgatcttttggtaaagaatctaaatgggaagagttactccatgattgtgaacaatctcttgaaacccatctctgtggaaggcagttcaaaaaaagtcaagactgatacagttcttatattgtgtagaaagaaagtggaaaacacaaggtgggattacctgacccaggttgaaaaggagtgcaaagaaaaagagaagccctcctatgacactgaaacagatcctagtgagggattgatgaatgttctaaagaaaatttatgaagatggagacgatgatatgaagcgaaccattaataaagcctgggtggaatcaagagagaagcaagccaaaggagacacggaattttgagactttaaagtcgttttgggaactgtgatgtgatgtgg

SEQ ID NO: 494 - DNA, 1087 bp, Homo sapiens
  misc_feature (129)..(129): n is a, c, g, or t
  misc_feature (166)..(166): n is a, c, g, or t
  misc_feature (219)..(219): n is a, c, g, or t
  misc_feature (222)..(222): n is a, c, g, or t
  misc_feature (768)..(768): n is a, c, g, or t
  misc_feature (804)..(804): n is a, c, g, or t
  misc_feature (814)..(814): n is a, c, g, or t
  misc_feature (831)..(831): n is a, c, g, or t
  misc_feature (836)..(836): n is a, c, g, or t
  misc_feature (877)..(877): n is a, c, g, or t
  misc_feature (881)..(881): n is a, c, g, or t
  misc_feature (899)..(899): n is a, c, g, or t
  misc_feature (905)..(905): n is a, c, g, or t
  misc_feature (914)..(914): n is a, c, g, or t
  misc_feature (916)..(916): n is a, c, g, or t
  misc_feature (929)..(929): n is a, c, g, or t
  misc_feature (940)..(940): n is a, c, g, or t
  misc_feature (946)..(946): n is a, c, g, or t
  misc_feature (948)..(948): n is a, c, g, or t
  misc_feature (950)..(950): n is a, c, g, or t
  misc_feature (964)..(964): n is a, c, g, or t
  misc_feature (972)..(972): n is a, c, g, or t
  misc_feature (974)..(975): n is a, c, g, or t
  misc_feature (990)..(990): n is a, c, g, or t
  misc_feature (994)..(994): n is a, c, g, or t
  misc_feature (1029)..(1029): n is a, c, g, or t
  misc_feature (1042)..(1042): n is a, c, g, or t
  misc_feature (1045)..(1045): n is a, c, g, or t
  misc_feature (1049)..(1049): n is a, c, g, or t
  misc_feature (1063)..(1063): n is a, c, g, or t
  misc_feature (1068)..(1069): n is a, c, g, or t
  misc_feature (1074)..(1074): n is a, c, g, or t
  misc_feature (1076)..(1079): n is a, c, g, or t
gatccctcgcttcagattgacatacctgatgcgctcagtgagagagacaaagtcaaatttacagtgcacacaaagattccacctgctcctacgaagcccgactttgatggtcctcgagagaagatgcanaaactgggagaaggtgaagggtctatgaccaaagaanaatttgccaagatgaaacaagaactggaagctgagtatctcgctgtgtttaanaanactgtgtcctcccatgaagtctttcttcagcggctttcttctcaccctgttctcagtaaagatcgcaactttcatgttttcctggaatatgatcaggatctaagtgttaggcggaaaaatactaaagaaatgtttggtggcttcttcaaaagtgtggtgaaaagtgctgatgaagtcctttttactggagttaaggaggtagatgacttctttgagcaagagaagaacttccttattaactattacaataggatcaaagattcttgtgtgaaagctgacaaaatgaccagatctcataaaaatgttgccgatgactatatccacaccgcagcctgcttacatagcctggctttagaagagcccacagtcatcaaaaagtacctattgaaggttgctgagctatttgaaaaactaaggaaagtagagggtcgagtttcatcagatgaagatttgaagctaacagagctcctccgatactacatgctcaacattgaagctgctaaggatctcttatacagacgcaccaaagccctcattgactatganaactcaaacaaagctctggataaggcccggttaaanagcaaagacntcaagttggctgaggcncccancaggagtgctgccaaaatttgaacaactttccgaatctgcnaaanaaaactgaaaatttcaancggaanaaagggccncntttaaaaaaatcnaattgaaatgnccggancngnaaaaaaacatgccnggaaacangnncccctttttgcaaanctgnattgacttgttcaaaaaaactgaaatgccctcccncaaaaaaaaaaangangggnaaaaaaacccaccnccctnnccttnannnnttccccgg

SEQ ID NO: 495 - DNA, 1088 bp, Homo sapiens
  misc_feature (769)..(769): n is a, c, g, or t
  misc_feature (790)..(790): n is a, c, g, or t
  misc_feature (792)..(792): n is a, c, g, or t
  misc_feature (853)..(853): n is a, c, g, or t
  misc_feature (856)..(856): n is a, c, g, or t
  misc_feature (861)..(861): n is a, c, g, or t
  misc_feature (863)..(863): n is a, c, g, or t
  misc_feature (872)..(872): n is a, c, g, or t
  misc_feature (874)..(874): n is a, c, g, or t
  misc_feature (894)..(894): n is a, c, g, or t
  misc_feature (900)..(900): n is a, c, g, or t
  misc_feature (906)..(906): n is a, c, g, or t
  misc_feature (926)..(926): n is a, c, g, or t
  misc_feature (934)..(934): n is a, c, g, or t
  misc_feature (941)..(941): n is a, c, g, or t
  misc_feature (973)..(973): n is a, c, g, or t
  misc_feature (976)..(976): n is a, c, g, or t
  misc_feature (980)..(980): n is a, c, g, or t
  misc_feature (983)..(983): n is a, c, g, or t
  misc_feature (986)..(986): n is a, c, g, or t
  misc_feature (990)..(990): n is a, c, g, or t
  misc_feature (998)..(998): n is a, c, g, or t
  misc_feature (1003)..(1003): n is a, c, g, or t
  misc_feature (1014)..(1014): n is a, c, g, or t
  misc_feature (1031)..(1031): n is a, c, g, or t
  misc_feature (1039)..(1039): n is a, c, g, or t
  misc_feature (1042)..(1042): n is a, c, g, or t
  misc_feature (1076)..(1076): n is a, c, g, or t
  misc_feature (1079)..(1079): n is a, c, g, or t
  misc_feature (1081)..(1081): n is a, c, g, or t
gcccacgcgtccggtgatgggcactgggcccatgtggtgtgtgccatctggatccctgaagtctgctttgctaacaccgtgttcttggaacctattgagggcattgacaatatcccgcctgcccgctggaaactaacctgctatatctgcaagcagaaagggctaggtgcagccatccagtgccataaggtgaactgctacacagcattccatgtgacatgtgcacagcgggctgggctcttcatgaagattgagcccatgcgcgaaaccagcctcaatggcaccatctttacagtgcgcaagactgcctactgtgaggcccactcgccaccaggtgcggccactgctaggaggaagggcgactcccctagaagcatcagtgagactggcgatgaggaagggctgaaggagggtgatggagaggaggaagaagaggaagaggtggaggaagaagagcaggaagctcaaggcggggtgagtggctccctcaagggagtgcccaagaaaagcaagatgagtttgaagcagaagatcaagaaggagccagaggaagcaggccaagacacaccctccactctccccatgcttgctgtcccacagataccctcttacaggttgaacaagatctgtagtggtctctcctttcagaggaaaaaccagtttatgcagcggcttcacaattattggctgttgaagcggcaggcacggaatggtgtccctcttatccggcgcttgcactcccatctgcagtcccaaaagaaacgctgancaccgagagcaggatgaaaananaagtgcagtgaaggaggaactgaatattggcaaaagctcccgcatgacttggaacgggccncgncttcntnattgaactnanttccgaaaaaaaaaaaaacntcaaangaaaancagggtcaaaatcccaccangcttcccntggaacntgaacctgaatgccattcaatgttttgttganaanaaanccntgnaccnttctgcanaaaanaatcctgccancttttttccaaaaccanccaatttnagngaggtttccaaaataacctgaatttctttcccanccnanggaattt

SEQ ID NO: 496 - DNA, 1089 bp, Homo sapiens
  misc_feature (706)..(706): n is a, c, g, or t
  misc_feature (759)..(759): n is a, c, g, or t
  misc_feature (764)..(764): n is a, c, g, or t
  misc_feature (807)..(807): n is a, c, g, or t
  misc_feature (834)..(834): n is a, c, g, or t
  misc_feature (838)..(838): n is a, c, g, or t
  misc_feature (865)..(865): n is a, c, g, or t
  misc_feature (868)..(868): n is a, c, g, or t
  misc_feature (889)..(889): n is a, c, g, or t
  misc_feature (897)..(898): n is a, c, g, or t
  misc_feature (900)..(900): n is a, c, g, or t
  misc_feature (903)..(903): n is a, c, g, or t
  misc_feature (914)..(914): n is a, c, g, or t
  misc_feature (917)..(917): n is a, c, g, or t
  misc_feature (924)..(924): n is a, c, g, or t
  misc_feature (932)..(932): n is a, c, g, or t
  misc_feature (936)..(936): n is a, c, g, or t
  misc_feature (947)..(947): n is a, c, g, or t
  misc_feature (949)..(949): n is a, c, g, or t
  misc_feature (951)..(951): n is a, c, g, or t
  misc_feature (959)..(959): n is a, c, g, or t
  misc_feature (967)..(967): n is a, c, g, or t
  misc_feature (973)..(973): n is a, c, g, or t
  misc_feature (985)..(986): n is a, c, g, or t
  misc_feature (998)..(998): n is a, c, g, or t
  misc_feature (1000)..(1000): n is a, c, g, or t
  misc_feature (1012)..(1012): n is a, c, g, or t
  misc_feature (1014)..(1015): n is a, c, g, or t
  misc_feature (1017)..(1017): n is a, c, g, or t
  misc_feature (1032)..(1032): n is a, c, g, or t
  misc_feature (1046)..(1047): n is a, c, g, or t
  misc_feature (1052)..(1053): n is a, c, g, or t
  misc_feature (1055)..(1057): n is a, c, g, or t
  misc_feature (1063)..(1063): n is a, c, g, or t
  misc_feature (1077)..(1078): n is a, c, g, or t
gggcagggaatctggcttgattggcgtgctgagacgcacctggcgcaaccctcccttctgaatcgaagttcaagtcccgcggacactgcaaccatgaaggagagacgggccccccagccagtcgtggccagatgtaagctcgttctggtcggggacgtgcagtgtgggaagaccgcgatgttgcaagtgttagcgaaggattgctatccagagacctatgtgcccaccgtgttcgaaaattacacagcctgtttggagacagaggaacagagggtggagcttagtctctgggatacctcaggatctccctactacgataatgtccgtccactctgctacagcgactcggatgcagtattactatgttttgacatcagccgtccagagacagtggacagcgcactcaagaagtggaggacagaaatcctagattattgtcccagcacccgcgttttgctcattggctgcaagacagacctgcgaacagacctgagtactctgatggagctgtcccaccagaagcaggcgcccatctcctatgagcagggttgtgcaatagcaaagcagctgggtgcagaaatctacctggaaggctcagctttcacctcagaaaagagcatccacagcatctttcggacggcatccatgctgtgtctgaacaagcctagcccactgccccagaagagccctgtccgaagcctctccnaaacgactgctccacctccccagtcgctctgaactcatctcttctaccttcanaaagnaaaaggccaaaagctgtttccattatgtgaagtggaaattggnagggggggaaacaaccccctacttccntccnttggggtgcaaaaggcacgggggaaanggnaggatgaaaccattttaggancctggganntnaanttttttcaaanggnccccggngaagggcnttgnaaaggaaacangnantggggccnaggaaagnacccangccccggcatgnngaacctgaaccntnaaaaaaaaaccntnntnccccaagcccgggcnctaaaattttggannggggnnannnaccccngggccccccccccnnccaaaaaaaaa

SEQ ID NO: 497 - DNA, 977 bp, Homo sapiens
  misc_feature (697)..(697): n is a, c, g, or t
  misc_feature (699)..(699): n is a, c, g, or t
  misc_feature (702)..(702): n is a, c, g, or t
  misc_feature (741)..(742): n is a, c, g, or t
  misc_feature (744)..(744): n is a, c, g, or t
  misc_feature (765)..(765): n is a, c, g, or t
  misc_feature (772)..(772): n is a, c, g, or t
  misc_feature (786)..(788): n is a, c, g, or t
  misc_feature (793)..(793): n is a, c, g, or t
  misc_feature (797)..(797): n is a, c, g, or t
  misc_feature (801)..(801): n is a, c, g, or t
  misc_feature (823)..(823): n is a, c, g, or t
  misc_feature (827)..(827): n is a, c, g, or t
  misc_feature (850)..(850): n is a, c, g, or t
  misc_feature (854)..(854): n is a, c, g, or t
  misc_feature (859)..(860): n is a, c, g, or t
  misc_feature (871)..(871): n is a, c, g, or t
  misc_feature (874)..(874): n is a, c, g, or t
  misc_feature (877)..(877): n is a, c, g, or t
  misc_feature (883)..(883): n is a, c, g, or t
  misc_feature (886)..(886): n is a, c, g, or t
  misc_feature (893)..(893): n is a, c, g, or t
  misc_feature (902)..(902): n is a, c, g, or t
  misc_feature (919)..(919): n is a, c, g, or t
  misc_feature (930)..(930): n is a, c, g, or t
  misc_feature (935)..(937): n is a, c, g, or t
  misc_feature (945)..(946): n is a, c, g, or t
  misc_feature (953)..(954): n is a, c, g, or t
  misc_feature (961)..(961): n is a, c, g, or t
gcccacgcgtccgctgccattgaggagagctgggagtctatgtttaacgatgatggtgactgcctggatccacgtcttctacaagagttatcagggaataccaagagcagagagagcatccaggaacctagatctgattactacaatcatgaagttcctgatattgacctcagtgattgtgaattcccacatgtcattgaaatttatgactttccccaagaatttcgtactgaagaccttctacgggttttctgcagttatcaaaagaaaggatttgatattaaatgggtggatgatacacatgccctaggagtattctccagtccaattacagctcgtgatgcgttgggtattaaacacaccatggtgaagattcgtcccttgtcacaggccacaagagcagccaaggccaaagctagagcttatgctgagttcctccagccagcaaaggagcgtcctgagacttcagcagccctagccagaaggttagtcatcagtgcccttggggttcgaagtaagcagagcaaaaccgaacgagaagcagagctcaagaaactgcaagaagccagagagagaaagcggttggaagccaagcaacgggaagacatctgggaaggcagagaccagtctacagtttgaacatcactcaatgaaagggataattccatgaatcagaaaatgtttccatagccttcananaanatgatccttccagagctctatgtacatgcaggatgtgcnngnttaaaagataaaagtgatccnagacaangactgacctgggtnnnaaaangaanacanactcctgtcttcccctcctaangcanttctttgggaatcaccctactgngggngggcnnaattaaggganccntcncctagnaanaaacggngggaaaagngaattccagaatttccnggaaaagggcnaagtnnntgttaccnngggtccnncttccgnaaatttttaaagccaa

SEQ ID NO: 498 - DNA, 1176 bp, Homo sapiens
  misc_feature (778)..(778): n is a, c, g, or t
  misc_feature (807)..(807): n is a, c, g, or t
  misc_feature (884)..(884): n is a, c, g, or t
  misc_feature (893)..(893): n is a, c, g, or t
  misc_feature (900)..(900): n is a, c, g, or t
  misc_feature (906)..(906): n is a, c, g, or t
  misc_feature (919)..(919): n is a, c, g, or t
  misc_feature (925)..(925): n is a, c, g, or t
  misc_feature (939)..(939): n is a, c, g, or t
  misc_feature (959)..(959): n is a, c, g, or t
  misc_feature (961)..(961): n is a, c, g, or t
  misc_feature (978)..(978): n is a, c, g, or t
  misc_feature (980)..(980): n is a, c, g, or t
  misc_feature (989)..(990): n is a, c, g, or t
  misc_feature (1000)..(1000): n is a, c, g, or t
  misc_feature (1009)..(1010): n is a, c, g, or t
  misc_feature (1013)..(1014): n is a, c, g, or t
  misc_feature (1018)..(1018): n is a, c, g, or t
  misc_feature (1020)..(1020): n is a, c, g, or t
  misc_feature (1023)..(1024): n is a, c, g, or t
  misc_feature (1027)..(1027): n is a, c, g, or t
  misc_feature (1034)..(1035): n is a, c, g, or t
  misc_feature (1042)..(1042): n is a, c, g, or t
  misc_feature (1060)..(1060): n is a, c, g, or t
  misc_feature (1072)..(1072): n is a, c, g, or t
  misc_feature (1083)..(1083): n is a, c, g, or t
  misc_feature (1093)..(1093): n is a, c, g, or t
  misc_feature (1096)..(1096): n is a, c, g, or t
  misc_feature (1105)..(1105): n is a, c, g, or t
  misc_feature (1109)..(1109): n is a, c, g, or t
  misc_feature (1121)..(1121): n is a, c, g, or t
  misc_feature (1150)..(1150): n is a, c, g, or t
  misc_feature (1167)..(1167): n is a, c, g, or t
  misc_feature (1169)..(1169): n is a, c, g, or t
  misc_feature (1173)..(1173): n is a, c, g, or t
gggcgggaggaaggcggcatgccccagacggtgatcctcccgggccctgcgccctggggcttcaggctctcagggggcatagacttcaaccagcctttggtcatcaccaggattacaccaggaagcaaggcggcagctgccaacctgtgtcctggagatgtcatcctggctattgacggctttgggacagagtccatgactcatgctgatgcgcaggacaggattaaagcagcagctcaccagctgtgtctcaaaattgacaggggagaaactcacttatggtctccacaagtatctgaagatgggaaagcccatcctttcaaaatcaacttagaatcagaaccacaggaattcaaacccattggtaccgcgcacaacagaagggcccagccttttgttgcagctgcaaacattgatgacaaaagacaggtagtgagcgcttcctataactcgccaattgggctctattcaactagcaatatacaagatgcgcttcacggacagctgcggggtctcattcctagctcacctcaaaacgagcccacagcctcggtgccccccgagtcggacgtgtaccggatgctccacgacaatcggaatgagcccacacagcctcgccagtcgggctccttcagagtgctccagggaatggtggacgatggctctgatgaccgtccggctggaacgcggagtgtgagagctccggtgacgaaagtccatggcggttcaggcggggcacagaggatgccgctctgtgacaaatgtgggagtggcatanttggtgctgtggtgaaagcgcgggataantaccggcaccctgagtgcttcgtgtgtgccgactgcaacctcaacctcaagcaaaagggctacttcttcataaaaangggaacctntactgcnaaaccnacgcaagaacccncccaangccccccaaaaggnctatgaaccggtccctcttntntcccaaagctttaattntntgcaggggnnggaaggaagnaggcacccnnccnngggnanttnncanaaaaaanntttttgnttttggccaaaaagaatngggcaaatttcnactccaaatcnaaggcaaggnttnaaacctttncctntttttttttggnaaaaagaagggaaggcaaatccctctttnaaaaaaaaaccttaccntntttncac

SEQ ID NO: 499 - DNA, 1202 bp, Homo sapiens
  misc_feature (767)..(767): n is a, c, g, or t
  misc_feature (783)..(783): n is a, c, g, or t
  misc_feature (856)..(856): n is a, c, g, or t
  misc_feature (858)..(858): n is a, c, g, or t
  misc_feature (871)..(871): n is a, c, g, or t
  misc_feature (880)..(880): n is a, c, g, or t
  misc_feature (883)..(883): n is a, c, g, or t
  misc_feature (894)..(894): n is a, c, g, or t
  misc_feature (904)..(904): n is a, c, g, or t
  misc_feature (917)..(917): n is a, c, g, or t
  misc_feature (935)..(935): n is a, c, g, or t
  misc_feature (940)..(940): n is a, c, g, or t
  misc_feature (942)..(942): n is a, c, g, or t
  misc_feature (945)..(945): n is a, c, g, or t
  misc_feature (947)..(947): n is a, c, g, or t
  misc_feature (954)..(954): n is a, c, g, or t
  misc_feature (958)..(958): n is a, c, g, or t
  misc_feature (970)..(970): n is a, c, g, or t
  misc_feature (973)..(973): n is a, c, g, or t
  misc_feature (1019)..(1019): n is a, c, g, or t
  misc_feature (1022)..(1022): n is a, c, g, or t
  misc_feature (1024)..(1024): n is a, c, g, or t
  misc_feature (1042)..(1042): n is a, c, g, or t
  misc_feature (1046)..(1046): n is a, c, g, or t
  misc_feature (1049)..(1050): n is a, c, g, or t
  misc_feature (1068)..(1068): n is a, c, g, or t
  misc_feature (1083)..(1083): n is a, c, g, or t
  misc_feature (1092)..(1092): n is a, c, g, or t
  misc_feature (1100)..(1100): n is a, c, g, or t
  misc_feature (1104)..(1104): n is a, c, g, or t
  misc_feature (1108)..(1108): n is a, c, g, or t
  misc_feature (1112)..(1112): n is a, c, g, or t
  misc_feature (1115)..(1115): n is a, c, g, or t
  misc_feature (1118)..(1118): n is a, c, g, or t
  misc_feature (1123)..(1123): n is a, c, g, or t
  misc_feature (1137)..(1137): n is a, c, g, or t
  misc_feature (1144)..(1144): n is a, c, g, or t
  misc_feature (1163)..(1163): n is a, c, g, or t
  misc_feature (1193)..(1193): n is a, c, g, or t
  misc_feature (1196)..(1197): n is a, c, g, or t
gattctgtacagaagttaccaatttgtgcacagtgtgggaaaacaaagtgcatgatgaagtcttcagactgtgtcataaagcatgctggtgtatacagtactggccttgcaatggtgggtgcaatatgtgacttctgtgaagcttgggtttgccatggtaggaaatgtctcagtacacatgcttgtgcctgccctcttaccgatgctgagtgtgttgaatgtgaacgaggcgtgtgggaccatggaggcagaatattcagttgttctttttgccataactttctctgtgaagatgatcaatttgagcatcaagccagctgccaggttttagaggcagaaacatttaaatgtgtttcatgcaatcggcttggtcagcactcatgtctccgttgtaaggcttgtttctgtgatgatcatacaaggagcaaagtgtttaagcaagaaaaaggaaaacagcctccttgtcctaaatgtgggcatgaaactcaggagactaaggaccttagcatgtcaacacgctccctgaaatttggcaggcagactggaggtgaagagggagatggagcttctgggtatgatgcttattggaagaacctttcatctgataagtatggtgataccagctaccacgatgaggaggaggatgagtatgaagcagaggatgatgaagaggaagaagatgaaggcagaaaggattcagatactgagtcatcagatttgtttactaatttgaatttaggaaggacctatgctagtggctatgctcnctatgaggaacaaganaactaggggagctgctctggtggccgtgtgtgaaaagaaccaggaatgaatgtgtgtgcttgatgaattgggngnggtttgtccaaantaccttaanccncttaaccctgngcaaaaaaanaaatttacccttnaatgggcccaaaccaaanagggngnaancngtttttnaaanaacctgaaaaanccnggcttaagggcaaaaaaaaaaaatgaatttccaaattttaaaaatnttnanttgatccaaacccaattnaaantanncccgggaattggaatggnttacccgaattcccnaaaaaaaanggttttgncccntttnaaanccnttnttccnaaaaaaagggaaanggggggnaaaaattttgttttgaaanaaaataccggttttaaaaaaaaaaaccgcnttnntgggc

SEQ ID NO: 500 - DNA, 1088 bp, Homo sapiens
  misc_feature (845)..(845): n is a, c, g, or t
  misc_feature (847)..(847): n is a, c, g, or t
  misc_feature (892)..(892): n is a, c, g, or t
  misc_feature (897)..(897): n is a, c, g, or t
  misc_feature (961)..(961): n is a, c, g, or t
  misc_feature (963)..(963): n is a, c, g, or t
  misc_feature (976)..(976): n is a, c, g, or t
  misc_feature (1001)..(1001): n is a, c, g, or t
  misc_feature (1005)..(1005): n is a, c, g, or t
  misc_feature (1007)..(1007): n is a, c, g, or t
  misc_feature (1010)..(1010): n is a, c, g, or t
  misc_feature (1019)..(1020): n is a, c, g, or t
  misc_feature (1026)..(1027): n is a, c, g, or t
  misc_feature (1041)..(1041): n is a, c, g, or t
  misc_feature (1059)..(1059): n is a, c, g, or t
  misc_feature (1065)..(1065): n is a, c, g, or t
  misc_feature (1069)..(1069): n is a, c, g, or t
  misc_feature (1081)..(1081): n is a, c, g, or t
  misc_feature (1086)..(1086): n is a, c, g, or t
gaagacaaagccactgtgctaaccacggagcgcaagaagagagggaagactgtgcctgaggagctggtgaagccagaagagctcagcaaataccggcaggtggcatcccacgtggggttgcacagtgccagcattcctgggatcctggccctggacctctgcccgtccgacaccaacaagatcctcactggtggggcggataaaaatgtcgttgtgtttgacaaaagttctgaacaaatcctggctaccctcaaaggccataccaagaaggtcaccagcgtggtgtttcacccttcccaggacctggtgttttctgcttcccccgatgccactatcaggatttggtcggtccccaatgcctcttgtgtacaggtggttcgggcccatgagagtgctgtgacaggcctcagccttcatgccactggcgactatctcctgagctcctccgatgatcagtactgggctttctctgacatccagacagggcgtgtgctcaccaaggtgacagatgagacctccggctgctctctcacctgtgcacagttccaccctgacggactcatctttggaacaggaaccatggactctcagatcaagatctgggacttgaaggaacgtactaatgtggccaacttccctggccactcgggccccatcactagcatcgccttctctgagaatggttactacctggctacagcggctgatgactcctctgtcaagctctgggatctgcgcaagcttaagaactttaagactttgcagctggataacaactttgaggtaaagtcactgatctttgaccagagtggtacctacctggctcttgggggcacggaatgtcnanatctacatctgcaaacaatggacggaaattcttcactttacaaancatancggcctgaccacaggggtggccttcgggcatcacgccaagttcatcgcttcaacaggcatggananaaacctcaagttntacagcctgtaggccctggcccttntgangnaanctgggcctnntctccnntaaagggtaaaatnaggtttgggggggggggngggggnaatntttggggggganggggnct

SEQ ID NO: 501 - DNA, 903 bp, Homo sapiens
gccggcactgcgcacttgccagccagtccgcccgtccggagcccggctcgctggggcagcatggcggggtcgccgctgctctgggggccgcgggccgggggcgtcggccttttggtgctgctgctgctcggcctgtttcggccgccccccgcgctctgcgcgcggccggtaaaggagccccgcggcctaagcgcagcgtctccgcccttggctgagactggcgctcctcgccgcttccggcggtcagtgccccgaggtgaggcggcgggggcggtgcaggagctggcgcgggcgctggcgcatctgctggaggccgaacgtcaggagcgggcgcgggccgaggcgcaggaggctgaggatcagcaggcgcgcgtcctggcgcagctgctgcgcgtctggggcgccccccgcaactctgatccggctctgggcctggacgacgaccccgacgcgcctgcagcgcagctcgctcgcgctctgctccgcgcccgccttgaccctgccgccctcgcagcccagcttgtccccgcgcccgtccccgccgcggcgctccgaccccggcccccggtctacgacgacggccccgcgggcccggatgctgaggaggcaggcgacgagacacccgacgtggaccccgagctgttgaggtacttgctgggacggattcttgcgggaagcgcggactccgagggggtggcagccccgcgccgcctccgccgtgccgccgaccacgatgtgggctctgagctgccccctgagggcgtgctgggggcgctgctgcgtgtgaaacgcctagagaccccggcgccccaggtgcctgcacgccgcctcttgccaccctgagcactgcccggatcccgtgcaccctgggacccagaagtgcccccgccatcccgccaccag

SEQ ID NO: 502 - DNA, 1027 bp, Homo sapiens
  misc_feature (884)..(884): n is a, c, g, or t
  misc_feature (904)..(905): n is a, c, g, or t
  misc_feature (956)..(956): n is a, c, g, or t
  misc_feature (962)..(962): n is a, c, g, or t
  misc_feature (965)..(966): n is a, c, g, or t
  misc_feature (971)..(971): n is a, c, g, or t
  misc_feature (977)..(977): n is a, c, g, or t
  misc_feature (982)..(982): n is a, c, g, or t
  misc_feature (989)..(989): n is a, c, g, or t
  misc_feature (992)..(993): n is a, c, g, or t
  misc_feature (998)..(998): n is a, c, g, or t
  misc_feature (1001)..(1001): n is a, c, g, or t
  misc_feature (1004)..(1004): n is a, c, g, or t
  misc_feature (1014)..(1014): n is a, c, g, or t
  misc_feature (1018)..(1018): n is a, c, g, or t
  misc_feature (1023)..(1023): n is a, c, g, or t
gagcatggcggacgcagctcctcaactaggcaagaggaagcgcgaattggacgtggaggaggcccacgccgccagcacagaggaaaaggaggcaggagttggaaatggtacctgtgctcctgtccgcttaccgttctccggcttcagactgcagaaggtgctgagggagtctgcgcgggacaaaatcattttcctacacgggaaggtgaatgaggcctctggggatggggatggagaggatgccgttgtgatcctggagaagacgccatttcaggtggaacaggtggctcagctcctgacgggcagccctgagctccaattgcagttctccaatgatatctacagcacctatcacttgttccctccaagacaactgaatgatgtaaagacgaccgtggtttaccctgccacagagaaacacctgcagaagtacctgcgccaggacctccgcctgatccgagagacgggagatgactacaggaatattactttaccccacctggagtcccagagcctcagcatccagtgggtgtataacattctcgacaagaaggctgaagcggaccggattgttttcgagaacccagatccctctgatggttttgtcctcatccctgacctcaagtggaaccaacagcagctcgatgacttgtacttgatcgccatctgccatcgccggggcatcagatccctacgcgaccttactccggagcacttgccgctgctcaggaacatcctccaccaggggcaggaggccatcctgcagcgctaccggatgaagggagaccatctgcgagtatacctgcactacctgcccctcctactaccacctgcatgtgcacttcaccgccctgggcttcgaggcccccggctcaggcgtggancgggcccacctgctggctgnngtgatcgaaaacttggaagtggggaccttaggcactaccagcagcggaagnctcacnttnnccctncagggntgaanaaccccntgnntcaanctnttnggagggaggntcanccaancttg

SEQ ID NO: 503 - DNA, 1027 bp, Homo sapiens; identical to SEQ ID NO: 502
  misc_feature (884)..(884): n is a, c, g, or t
  misc_feature (904)..(905): n is a, c, g, or t
  misc_feature (956)..(956): n is a, c, g, or t
  misc_feature (962)..(962): n is a, c, g, or t
  misc_feature (965)..(966): n is a, c, g, or t
  misc_feature (971)..(971): n is a, c, g, or t
  misc_feature (977)..(977): n is a, c, g, or t
  misc_feature (982)..(982): n is a, c, g, or t
  misc_feature (989)..(989): n is a, c, g, or t
  misc_feature (992)..(993): n is a, c, g, or t
  misc_feature (998)..(998): n is a, c, g, or t
  misc_feature (1001)..(1001): n is a, c, g, or t
  misc_feature (1004)..(1004): n is a, c, g, or t
  misc_feature (1014)..(1014): n is a, c, g, or t
  misc_feature (1018)..(1018): n is a, c, g, or t
  misc_feature (1023)..(1023): n is a, c, g, or t

SEQ ID NO: 504 - DNA, 1057 bp, Homo sapiens
  misc_feature (799)..(799): n is a, c, g, or t
  misc_feature (825)..(825): n is a, c, g, or t
  misc_feature (857)..(857): n is a, c, g, or t
  misc_feature (916)..(916): n is a, c, g, or t
  misc_feature (922)..(922): n is a, c, g, or t
  misc_feature (942)..(942): n is a, c, g, or t
  misc_feature (956)..(956): n is a, c, g, or t
  misc_feature (974)..(974): n is a, c, g, or t
  misc_feature (976)..(978): n is a, c, g, or t
  misc_feature (980)..(980): n is a, c, g, or t
  misc_feature (998)..(998): n is a, c, g, or t
  misc_feature (1003)..(1003): n is a, c, g, or t
  misc_feature (1013)..(1013): n is a, c, g, or t
  misc_feature (1015)..(1015): n is a, c, g, or t
  misc_feature (1023)..(1023): n is a, c, g, or t
  misc_feature (1027)..(1027): n is a, c, g, or t
  misc_feature (1032)..(1032): n is a, c, g, or t
  misc_feature (1037)..(1037): n is a, c, g, or t
  misc_feature (1039)..(1039): n is a, c, g, or t
  misc_feature (1045)..(1045): n is a, c, g, or t
  misc_feature (1050)..(1050): n is a, c, g, or t
  misc_feature (1052)..(1052): n is a, c, g, or t
ggccaagaggagatagatgtgtggacactggagcggaaaggagcattcagccgggaggctttctttggcggcaatggaaagattaaccttactgtgttcaaacttctccaggagcatcttggggaatttatattcctttgtgagaaatgttttgatcataagcctagaatgataagtaaaagaaataaagataattctactgcttgttctcacccggttacaaagcatgagtttgaagacaataagtgccttgtccacattttgcgagagacaacagtaaaatactccaaaatacgttcttttcatggtcagtgtcagcttgatttatgtcgacatgaagttcggtatggctgtttaagggaagatgagtgcttttatgcccatagtcttgtggaactgaaagtctggataatgcaaaatgaaacaggtatctcacatgatgctattgctcaagagtctaaacgatattggcagaatttggaagcaaatgtacctggagcgcaggtacttggtaatcaaataatgcctggatttcttaatatgaagataaagtttgtgtgcgcccagtgtctgagaaacggtcaagtcattgaaccagacaaaaacagaaaatattgtagtgcaaaagcaaggcattcgtggaccaaagaccggcgtgcgatgagagtgatgtctattgaacgtaagaagtggatgaacatccgtcctctccccacaaagaaacaaatgcctttacagtttgatctgtgcaaccatattgcttctgggaaaaaatgtcaatatgtgggaaactgttccnttgctcatagtcctgaggaaagagangtttggacttacatgaaggagaatgggatacnaagatatggagcaattttacgaactatggctcagagtccaaaaaatgaaaaaagtgaanacatanccgtccgtcaaaaaggaaangggaaacaattccntgccacaattatgctgantnnngnggacttccctgctggagnggggnaaactgcacngngaaaacanggcnggccntcccncnaaaacnaaaanangttcc

SEQ ID NO: 505 - DNA, 996 bp, Homo sapiens
  misc_feature (771)..(771): n is a, c, g, or t
  misc_feature (806)..(806): n is a, c, g, or t
  misc_feature (885)..(885): n is a, c, g, or t
  misc_feature (891)..(891): n is a, c, g, or t
  misc_feature (901)..(901): n is a, c, g, or t
  misc_feature (917)..(917): n is a, c, g, or t
  misc_feature (940)..(940): n is a, c, g, or t
  misc_feature (950)..(950): n is a, c, g, or t
  misc_feature (962)..(962): n is a, c, g, or t
  misc_feature (974)..(996): n is a, c, g, or t
gcggacgcgtgggcggacgcgtgggggagaggcgagctcgcgatgagtggtctcggcaggctcttcgggaaggggaagaaggagaaagggccaacccctgaagaagcaatacagaaactgaaggagacagagaagatactgatcaagaaacaggaatttttggagcagaagattcaacaggagctacaaacagccaagaagtatgggaccaagaataagagagctgccctacaggctttgcggaggaagaaaagattcgaacagcagctggcacaaactgacgggacattatccaccctggagtttcagcgtgaggccattgagaatgccactaccaatgcagaagtccttcgtaccatggagcttgctgcccaaagcatgaagaaggcctaccaggacatggacattgacaaggtagatgaactgatgactgacatcacggaacaacaggaggtggcccagcagatctcagatgccatttctcggcctatgggctttagagatgatgtggatgaggatgaactgctggaggagctagaggagctggagcaggaggaattggcccaggagttgttaaatgtgggcgacaaggaagaagaaccctcagtcaaattgcctagtgtaccttctactcatctgccggcagggccagctcccaaagtggatgaagatgaagaagcactaaagcagttggctgagtgggtatcctgataaatctgggcttgtcttcctaatgctacctttgttggtcctttcttccttaagtgccangtgctgagctaaaggaggataactttttggggaantcatgctgagggtggtagtgtgaccctgcctgaaaaaagggtctcttaccctcccagccctggctcaactctgaaaaangatctngctacagaangagcccttgggctccntctctttgatagcagtttaatgnccttgttccnataaactgggcngatggaaaaaannnnnnnnnnnnnnnnnnnnnnn

SEQ ID NO: 506 - DNA, 884 bp, Homo sapiens
  misc_feature (563)..(563): n is a, c, g, or t
  misc_feature (574)..(574): n is a, c, g, or t
  misc_feature (576)..(576): n is a, c, g, or t
  misc_feature (583)..(583): n is a, c, g, or t
  misc_feature (650)..(650): n is a, c, g, or t
  misc_feature (654)..(654): n is a, c, g, or t
  misc_feature (657)..(657): n is a, c, g, or t
  misc_feature (681)..(681): n is a, c, g, or t
  misc_feature (698)..(698): n is a, c, g, or t
  misc_feature (701)..(701): n is a, c, g, or t
  misc_feature (711)..(711): n is a, c, g, or t
  misc_feature (719)..(719): n is a, c, g, or t
  misc_feature (722)..(722): n is a, c, g, or t
  misc_feature (730)..(730): n is a, c, g, or t
  misc_feature (732)..(734): n is a, c, g, or t
  misc_feature (738)..(738): n is a, c, g, or t
  misc_feature (743)..(743): n is a, c, g, or t
  misc_feature (750)..(750): n is a, c, g, or t
  misc_feature (754)..(754): n is a, c, g, or t
  misc_feature (756)..(756): n is a, c, g, or t
  misc_feature (763)..(763): n is a, c, g, or t
  misc_feature (776)..(776): n is a, c, g, or t
  misc_feature (778)..(778): n is a, c, g, or t
  misc_feature (781)..(781): n is a, c, g, or t
  misc_feature (784)..(784): n is a, c, g, or t
  misc_feature (791)..(791): n is a, c, g, or t
  misc_feature (793)..(793): n is a, c, g, or t
  misc_feature (797)..(797): n is a, c, g, or t
  misc_feature (811)..(811): n is a, c, g, or t
  misc_feature (816)..(816): n is a, c, g, or t
  misc_feature (825)..(825): n is a, c, g, or t
  misc_feature (832)..(832): n is a, c, g, or t
  misc_feature (844)..(845): n is a, c, g, or t
  misc_feature (852)..(852): n is a, c, g, or t
  misc_feature (857)..(857): n is a, c, g, or t
  misc_feature (859)..(859): n is a, c, g, or t
gcggacgcgtgggggacaaatgtaagcaccacatatatcacatgccctgcagaccccaagaagacgctgggaattaaacttcctttccttgtcatgattatcaaaaacctgaagaagtattttaccttcgaagtgcaggtactagatgacaagaatgtgcgtcgtcgctttcgggcaagtaactaccagagcaccacccgggtcaaacccttcatctgcaccatgcccatgcggctggatgacggctggaaccagattcagttcaacttgctagacttcacacggcgagcatacggcaccaattacatcgagaccctcagagtgcagatccatgcaaattgtcgcatccgacgggtttacttctcagacagactctactcagaagatgagctgccggcagagttcaaactgtatctcccagttcagaacaaggcaaagcaataactggaattgtgactcgagggatagacccctggatgtgactcttctttttaaaaggaaactatgtggaggacgatgcaaaaacatatttatcttagtttgctctgctgtagttctgttanttatacttggngntgcttgncatggacaccggtgaacatgccgtaactctgtgactgcattgtaagtgcagtggggggtaagcagtnctgngantggcgcatgaacgctggaacttantcccccccctgccccantgnggggggaaanaccctttnccntgaacttncnnnaatnaaagntgggccntaangnaatcccnaacaaatatttcntnccnggngggttantnccanggttttaaaaaatnaaccnaaaaaaaangggaaanggcggggggccnnaaccccnaaaancngggaaaaaggaaaaaaagggggaaa

SEQ ID NO: 507 - DNA, 1181 bp, Homo sapiens
  misc_feature (840)..(840): n is a, c, g, or t
  misc_feature (863)..(863): n is a, c, g, or t
  misc_feature (879)..(879): n is a, c, g, or t
  misc_feature (912)..(912): n is a, c, g, or t
  misc_feature (932)..(932): n is a, c, g, or t
  misc_feature (935)..(935): n is a, c, g, or t
  misc_feature (940)..(940): n is a, c, g, or t
  misc_feature (944)..(944): n is a, c, g, or t
  misc_feature (956)..(956): n is a, c, g, or t
  misc_feature (963)..(963): n is a, c, g, or t
  misc_feature (967)..(967): n is a, c, g, or t
  misc_feature (988)..(988): n is a, c, g, or t
  misc_feature (990)..(990): n is a, c, g, or t
  misc_feature (997)..(997): n is a, c, g, or t
  misc_feature (1011)..(1011): n is a, c, g, or t
  misc_feature (1022)..(1022): n is a, c, g, or t
  misc_feature (1038)..(1038): n is a, c, g, or t
  misc_feature (1040)..(1040): n is a, c, g, or t
  misc_feature (1059)..(1059): n is a, c, g, or t
  misc_feature (1069)..(1069): n is a, c, g, or t
  misc_feature (1080)..(1080): n is a, c, g, or t
  misc_feature (1095)..(1095): n is a, c, g, or t
  misc_feature (1100)..(1100): n is a, c, g, or t
  misc_feature (1117)..(1117): n is a, c, g, or t
  misc_feature (1121)..(1121): n is a, c, g, or t
  misc_feature (1124)..(1124): n is a, c, g, or t
  misc_feature (1134)..(1134): n is a, c, g, or t
  misc_feature (1137)..(1137): n is a, c, g, or t
  misc_feature (1140)..(1140): n is a, c, g, or t
  misc_feature (1146)..(1146): n is a, c, g, or t
  misc_feature (1159)..(1159): n is a, c, g, or t
  misc_feature (1163)..(1163): n is a, c, g, or t
  misc_feature (1167)..(1167): n is a, c, g, or t
  misc_feature (1169)..(1169): n is a, c, g, or t
  misc_feature (1174)..(1174): n is a, c, g, or t
  misc_feature (1180)..(1180): n is a, c, g, or t
ggagtacctgtgccagatgaaaggtttgactttctttgtcaataccacaaaccagcaagcaaaattcctgcctttctaaatgtggtggatattgctggccttgtgaaaggagctcacaatgggcagggcctggggaatgcttttttatctcatattagtgcctgtgatggcatctttcatctaacacgtgcttttgaagatgatgatatcacgcacgttgaaggaagtgtagatcctattcgagatatagaaataatacatgaagagcttcagcttaaagatgaggaaatgattgggcccattatagataaactagaaaaggtggctgtgagaggaggagataaaaaactaaaacctgaatatgatataatgtgcaaagtaaaatcctgggttatagatcaaaagaaacctgttcgcttctatcatgattggaatgacaaagagattgaagtgttgaataaacacttatttttgacttcaaaaccaatggtctacttggttaatctttctgaaaaagactacattagaaagaaaaacaaatggttgataaaaattaaagagtgggtggacaagtatgacccaggtgctttggtcattccttttagtggggccttggaactcaagttgcaagaattgagtgctgaggagagacagaagtatctggaagcgaacatgacacaaagtgctttgccaaagatcattaaggctgggtttgcagcactccaactagaatactttttcactgcaggcccagatgaagtgcgtgcatggaccatcaggaaagggactaaggctcctcaggctgcaggaaagattcacacagattttgaaaagggatcnttatggctgaagtaatgaatacnaaattttaaagaggangttctgaaatgcagtcaaggctgctggaaagtncgacacaggcaaaattattngtngaaangganaattacctctcnatttacncccncacaccaaaaaaaaaatttantntgccaanaactacactccaangctcgattttnaaaattaaattcgaancnagcccaaaaagtggggaanggaacttganaacaatttttnttttttaaataaaanggggncccccccccccgaaagnggtnccnaaggaaaccnttnttnccggtnaacccccccattngaantttngnacaanatcccng

SEQ ID NO: 508 - DNA, 1110 bp, Homo sapiens
  misc_feature (801)..(801): n is a, c, g, or t
  misc_feature (848)..(848): n is a, c, g, or t
  misc_feature (851)..(851): n is a, c, g, or t
  misc_feature (866)..(866): n is a, c, g, or t
  misc_feature (888)..(888): n is a, c, g, or t
  misc_feature (893)..(894): n is a, c, g, or t
  misc_feature (900)..(900): n is a, c, g, or t
  misc_feature (912)..(912): n is a, c, g, or t
  misc_feature (923)..(923): n is a, c, g, or t
  misc_feature (929)..(929): n is a, c, g, or t
  misc_feature (932)..(932): n is a, c, g, or t
  misc_feature (983)..(983): n is a, c, g, or t
  misc_feature (1026)..(1026): n is a, c, g, or t
  misc_feature (1038)..(1038): n is a, c, g, or t
  misc_feature (1071)..(1071): n is a, c, g, or t
  misc_feature (1075)..(1075): n is a, c, g, or t
  misc_feature (1078)..(1078): n is a, c, g, or t
  misc_feature (1087)..(1088): n is a, c, g, or t
  misc_feature (1091)..(1092): n is a, c, g, or t
  misc_feature (1096)..(1096): n is a, c, g, or t
  misc_feature (1098)..(1098): n is a, c, g, or t
  misc_feature (1101)..(1101): n is a, c, g, or t
  misc_feature (1103)..(1103): n is a, c, g, or t
  misc_feature (1109)..(1109): n is a, c, g, or t
gggagaagcctttccagtgaccgtgggaggacaacccattcaccatatgaggaacggagtaggaccaagggcagtgggcagcagtcagagcggggctccgaccgcacccctgagcgcagccgcaaggagaaccactccagtgaagggaccaaggagtccagcagcaactccctcagcaacagcagacatggggctgaggaacggggccaccaccaccaccaccacgaggctgcagactcttcccacgggaagaaggcaagagacagcgagcgcaatcaccggaccacagaggccgagcccaagcctctggaagagccaaaacacgagaccaaaaagctgaagaatctttcagagtacgctcagacactacagctgggttggaatgggcttctggtgttgaaaaacagctgcttccccacgtctatgcatatcctagagggggaccagggggtgatcagcagtctcctcaaagaccacacttctgggagcaagctgacccagctgaagatcgcccagcgccttcgactggaccagcccaagcttgacgaggtcacacgacgcatcaagcaggggagccccaacggctatgcggtcctcttagccacccaggcaacccccagtgggcttggcactgaggggatgcccacagtagagcccggtctgcagaggcggcttctcaggaacctggtctcctacttgaaacagaagcaggccgcaggggtgatcagcttgccagtgggggggtccaagggcagagacggcacaggcatgctctacgccttcccacccctgcgacttttnccagcagtacctccagtcagcactaaggacattgggcaagctaaaanaanaacacatggtgatantcatcgtcaaaaaactgcctancccanncctgtntttccagcgtcntgtttgtgtcncaaaancanttttttaaatctgatcccctctctaccctaccctttggtttgaatatctcngggttatttggttcattggggggggatcaaattcctgtccccnccaaactaattnttaaattttgggggatttttttttttaacaatnaaanggnatccggttnnttnntttnanggnanaaaaang

SEQ ID NO: 509 - DNA, 1064 bp, Homo sapiens
  misc_feature (747)..(747): n is a, c, g, or t
  misc_feature (762)..(762): n is a, c, g, or t
  misc_feature (764)..(764): n is a, c, g, or t
  misc_feature (783)..(783): n is a, c, g, or t
  misc_feature (806)..(806): n is a, c, g, or t
  misc_feature (879)..(879): n is a, c, g, or t
  misc_feature (897)..(897): n is a, c, g, or t
  misc_feature (903)..(903): n is a, c, g, or t
  misc_feature (906)..(906): n is a, c, g, or t
  misc_feature (908)..(908): n is a, c, g, or t
  misc_feature (925)..(925): n is a, c, g, or t
  misc_feature (941)..(941): n is a, c, g, or t
  misc_feature (947)..(947): n is a, c, g, or t
  misc_feature (954)..(954): n is a, c, g, or t
  misc_feature (976)..(976): n is a, c, g, or t
  misc_feature (978)..(978): n is a, c, g, or t
  misc_feature (980)..(980): n is a, c, g, or t
  misc_feature (994)..(998): n is a, c, g, or t
  misc_feature (1006)..(1006): n is a, c, g, or t
  misc_feature (1008)..(1008): n is a, c, g, or t
  misc_feature (1015)..(1015): n is a, c, g, or t
  misc_feature (1018)..(1018): n is a, c, g, or t
  misc_feature (1026)..(1026): n is a, c, g, or t
  misc_feature (1028)..(1028): n is a, c, g, or t
  misc_feature (1043)..(1043): n is a, c, g, or t
  misc_feature (1049)..(1049): n is a, c, g, or t
  misc_feature (1059)..(1059): n is a, c, g, or t
  misc_feature (1061)..(1061): n is a, c, g, or t
  misc_feature (1063)..(1063): n is a, c, g, or t
gcccacgcgtccgcccacgcgtccgcggacgcgtgggcagaggcggagatcaaggttcgagaggccacgagcaatgacccctggggcccatccagctccctcatgtcagagattgccgacctcacctacaacgttgtcgccttctcggagatcatgagcatgatctggaagcggctcaatgaccatggcaagaactggcgtcacgtttacaaggccatgacgctgatggagtacctcatcaagaccggctcggagcgcgtgtcgcagcagtgcaaggagaacatgtacgccgtgcagacgctgaaggacttccagtacgtggaccgcgacggcaaggaccagggcgtgaacgtgcgtgagaaagctaagcagctggtggccctgctgcgcgacgaggaccggctgcgggaagagcgggcgcacgcgctcaagaccaaggaaaagctggcacagaccgccacggcctcatcagcagctgtgggctcaggcccccctcccgaggcggagcaggcgtggccgcagagcagcggggaggaggagctgcagctccagctggccctggccatgagcaaggaggaggccgaccagcccccgtcctgcggccccgaggacgacgcccagctccagctggcccttagtttgagccgagaagagcatgataaggaggagcggatccgtcgcggggatgacctgcggctgcagatggcaatcgaggagagcaagagggagactgggggcaaggaggantcgtccctcatggancnttgctgacgtcttcacggncccagctcctgccccgaccacanacccctgtccttccagctgctgatccctggggaggtccagcccccacgccggccttctggggaacccttggangcctgctgcccctgcagnaccctncantnaacccttggggtgggancccaccccctgcactnggggangggcccncccctgatccatggggaaattncnangggggggtcccggnnnnngggccctnanccttccnatncttgaaancnggccccgggcttttnaaattnttggggaggntncnt

SEQ ID NO: 510 - DNA, 1017 bp, Homo sapiens
  misc_feature (728)..(728): n is a, c, g, or t
  misc_feature (801)..(801): n is a, c, g, or t
  misc_feature (807)..(807): n is a, c, g, or t
  misc_feature (843)..(843): n is a, c, g, or t
  misc_feature (857)..(857): n is a, c, g, or t
  misc_feature (904)..(904): n is a, c, g, or t
  misc_feature (908)..(908): n is a, c, g, or t
  misc_feature (923)..(923): n is a, c, g, or t
  misc_feature (926)..(926): n is a, c, g, or t
  misc_feature (939)..(940): n is a, c, g, or t
  misc_feature (943)..(943): n is a, c, g, or t
  misc_feature (954)..(954): n is a, c, g, or t
  misc_feature (958)..(958): n is a, c, g, or t
  misc_feature (967)..(967): n is a, c, g, or t
  misc_feature (987)..(987): n is a, c, g, or t
  misc_feature (990)..(990): n is a, c, g, or t
  misc_feature (992)..(992): n is a, c, g, or t
  misc_feature (994)..(994): n is a, c, g, or t
  misc_feature (999)..(999): n is a, c, g, or t
  misc_feature (1007)..(1009): n is a, c, g, or t
  misc_feature (1011)..(1012): n is a, c, g, or t
  misc_feature (1015)..(1015): n is a, c, g, or t
  misc_feature (1017)..(1017): n is a, c, g, or t
gaagtccctgcccccaaagacgtcctcgcccaccaggtccccaacgccaagaagctcaggcggaaggagcagctatgggagaagctggccaagcagggcgagctgccccgggaggtgcgcagggcccaggcccggctcctcaacccttctgcaacaagggccaagcccgggccccaggacaccgtagagcggcccttctacgacctctgggcctcagacaaccccctggacaggccgttggttggccaggatgagtttttcctggagcagaccaagaagaaaggagtgaagcggccagcacgcctgcacaccaagccgtcccaggcgcccgccgtggaggtggcgcctgccggagcttcctacaatccatcctttgaagaccaccagacccagcgctgaggcggcggcggcgaggcccaagaataagaagcggggctggcggcggcttgctcaggagccgctggggctggaggttgaccagttcctggaagacgtgcggctacaggagcgcacgagcggtggcttgttgtcagaggccccaaatgaaaaactcttcttcgtggacactggctccaaggaaaaagggctgacaaagaagagaaccaaagtccagaagaagtcactgcttctcaagaaaccccttcgggttgacctcatcctcgagaacacatccaaagtccctgcccgccacggagcaggccgccacccaggagtccacattccagganctgtgcgaggggctgctggaggagtcggatggtgagggggaaccaggccagggcgaggggccggaagctgggnatgccnaagtctgtcccacgcccgcccgcctggccaccacanaaaaaaaaacggancaccaccggcggcgggaaaaagctgtgcaaaagctgcggttacacangccncgttgcgggcccccnggntcgggcacaagannttnttccggctgcncggnattaggccnaggtggccttaagcttggcnaantngncccgncgccgaannngnngcnan

SEQ ID NO: 511 - DNA, 886 bp, Homo sapiens
ggggaaatgctggcgcgcgcggcgcggggcactggggcccttttgctgaggggctctctactggcttctggccgcgctccgcgccgcgcctcctctggattgccccgaaacaccgtggtactgttcgtgccgcagcaggaggcctgggtggtggagcgaatgggccgattccaccggatcctggagcctggtttgaacatcctcatccctgtgttagaccggatccgatatgtgcagagtctcaaggaaattgtcatcaacgtgcctgagcagtcggctgtgactctcgacaatgtaactctgcaaatcgatggagtcctttacctgcgcatcatggacccttacaaggcaagctacggtgtggaggaccctgagtatgccgtcacccagctagctcaaacaaccatgagatcagagctcggcaaactctctctggacaaagtcttccgggaacgggagtccctgaatgccagcattgtggatgccatcaaccaagctgctgactgctggggtatccgctgcctccgttatgagatcaaggatatccatgtgccaccccgggtgaaagagtctatgcagatgcaggtggaggcagagcggcggaaacgggccacagttctagagtctgaggggacccgagagtcggccatcaatgtggcagaagggaagaaacaggcccagatcctggcctccgaagcagaaaaggctgaacagataaatcacgcagcaggagaggccagtgcagttctggcgaagccaaggctaaagctgagctattcgaatcctgctgcagctctgacacaacataatggagatgcagcagcttcactgactgtggccgagcagtatgtcagcgcgttctccaaactggccaaggactccaaca

SEQ ID NO: 512 - DNA, 1074 bp, Homo sapiens
  misc_feature (647)..(647): n is a, c, g, or t
  misc_feature (780)..(780): n is a, c, g, or t
  misc_feature (800)..(800): n is a, c, g, or t
  misc_feature (813)..(813): n is a, c, g, or t
  misc_feature (816)..(816): n is a, c, g, or t
  misc_feature (831)..(831): n is a, c, g, or t
  misc_feature (833)..(833): n is a, c, g, or t
  misc_feature (857)..(857): n is a, c, g, or t
  misc_feature (860)..(860): n is a, c, g, or t
  misc_feature (885)..(885): n is a, c, g, or t
  misc_feature (894)..(894): n is a, c, g, or t
  misc_feature (905)..(905): n is a, c, g, or t
  misc_feature (907)..(907): n is a, c, g, or t
  misc_feature (935)..(935): n is a, c, g, or t
  misc_feature (941)..(941): n is a, c, g, or t
  misc_feature (945)..(947): n is a, c, g, or t
  misc_feature (971)..(971): n is a, c, g, or t
  misc_feature (979)..(979): n is a, c, g, or t
  misc_feature (1011)..(1012): n is a, c, g, or t
  misc_feature (1014)..(1014): n is a, c, g, or t
  misc_feature (1029)..(1030): n is a, c, g, or t
  misc_feature (1033)..(1033): n is a, c, g, or t
  misc_feature (1036)..(1036): n is a, c, g, or t
  misc_feature (1042)..(1042): n is a, c, g, or t
  misc_feature (1045)..(1045): n is a, c, g, or t
  misc_feature (1052)..(1053): n is a, c, g, or t
  misc_feature (1057)..(1057): n is a, c, g, or t
  misc_feature (1064)..(1064): n is a, c, g, or t
  misc_feature (1071)..(1071): n is a, c, g, or t
gggggagcgttcctgggtgcctgtgtggctgggtctgatgagcctggcccagagggcctcacctccacctccctgctagacctcctgctgcccactggcttggagccactggactcagaggagcctagtgagaccatgggcctgggagctgggctgggagcccctggctcaggcttccccagcgaagagaatgaagagtctcggattctgcagccaccacagtacttctgggaagaggaggaagagctgaatgactcaagtctggacctgggacccactgcagattatgtttttcctgacttaactgagaaggcaggttccattgaagacaccagccaggctcaagagctgccaaacctcccctctcccttgcccaagatgaatctggttgagcctccctggcatatgcctcccagagaggaggaagaagaggaagaggaagaggaggagagggagaaggaagaggtagagaaacaagaggaggaggaagaggaggagctgctccctgtgaatggatcccaagaagaagccaagcctcaggtccgtgacttttctctcaccagcagcagccagaccccaggggccaccaaaagcaggcatgaagactccggggaccaggcctcatcaggtgtggaggtggagagcancatggggcccagcttgctgctgccttcagtcaccccaactacagtgactccgggggaccaggactccaccagccaaagaggcaaaggccacagtgctgccagctgcagggcttggggtaaagttcgaggctcntcaggaagcaagcgaggaanccactgcaggaancanctggtttgtctggcnancacgaagaaggtgccggccttgcnttnatttccctcaaaccaaagctcccantgggggccnaacacccaaantnaaaattccctttggctctaaaaactcancctttncccnnnggcccctggaaaaatggaaatgancccttccnttgttaccttggggaaaaaaaaaattcacccnncncctccctaaaagggnnggncanctaaanctnaattccnnaaancctgggnatttttnccc

SEQ ID NO: 513 - DNA, 1200 bp, Homo sapiens
  misc_feature (763)..(763): n is a, c, g, or t
  misc_feature (796)..(796): n is a, c, g, or t
  misc_feature (803)..(803): n is a, c, g, or t
  misc_feature (850)..(850): n is a, c, g, or t
  misc_feature (871)..(871): n is a, c, g, or t
  misc_feature (887)..(887): n is a, c, g, or t
  misc_feature (894)..(894): n is a, c, g, or t
  misc_feature (896)..(896): n is a, c, g, or t
  misc_feature (899)..(899): n is a, c, g, or t
  misc_feature (917)..(917): n is a, c, g, or t
  misc_feature (937)..(937): n is a, c, g, or t
  misc_feature (942)..(942): n is a, c, g, or t
  misc_feature (947)..(947): n is a, c, g, or t
  misc_feature (950)..(950): n is a, c, g, or t
  misc_feature (952)..(953): n is a, c, g, or t
  misc_feature (971)..(971): n is a, c, g, or t
  misc_feature (976)..(976): n is a, c, g, or t
  misc_feature (982)..(982): n is a, c, g, or t
  misc_feature (1023)..(1023): n is a, c, g, or t
  misc_feature (1033)..(1033): n is a, c, g, or t
  misc_feature (1057)..(1057): n is a, c, g, or t
  misc_feature (1063)..(1063): n is a, c, g, or t
  misc_feature (1071)..(1071): n is a, c, g, or t
  misc_feature (1077)..(1077): n is a, c, g, or t
  misc_feature (1086)..(1086): n is a, c, g, or t
  misc_feature (1089)..(1089): n is a, c, g, or t
  misc_feature (1097)..(1097): n is a, c, g, or t
  misc_feature (1099)..(1099): n is a, c, g, or t
  misc_feature (1104)..(1105): n is a, c, g, or t
  misc_feature (1113)..(1113): n is a, c, g, or t
  misc_feature (1125)..(1125): n is a, c, g, or t
  misc_feature (1136)..(1136): n is a, c, g, or t
  misc_feature (1141)..(1141): n is a, c, g, or t
  misc_feature (1147)..(1148): n is a, c, g, or t
  misc_feature (1157)..(1157): n is a, c, g, or t
  misc_feature (1163)..(1163): n is a, c, g, or t
  misc_feature (1173)..(1173): n is a, c, g, or t
  misc_feature (1187)..(1187): n is a, c, g, or t
  misc_feature (1192)..(1192): n is a, c, g, or t
  misc_feature (1194)..(1194): n is a, c, g, or t
  misc_feature (1197)..(1197): n is a, c, g, or t
  misc_feature (1200)..(1200): n is a, c, g, or t
ggcaggcccaaccgccgccagcaccatggccagcaccatttccgcctacaaggagaagatgaaggagctgtcggtgctgtcgctcatctgctcctgcttctacacacagccgcaccccaataccgtctaccagtacggggacatggaggtgaagcagctggacaagcgggcctcaggccagagcttcgaggtcatcctcaagtccccttctgacctgtccccagagagccctatgctctcctccccacccaagaagaaggacacctccctggaggagctgcaaaagcggctggaggcagccgaggagcggaggaagacgcaggaggcgcaggtgctgaagcagctggcggagcggcgcgagcacgagcgcgaggtgctgcacaaggcgctggaggagaataacaacttcagccgccaggcggaggagaagctcaactacaagatggagctcagcaaggagatccgcgaggcacacctggccgcactgcgcgagcggctgcgcgagaaggagctgcacgcggccgaggtgcgcaggaacaaggagcagcgagaagagatgtcgggctaagggcccgggacgggcggcgcccatcctgcgacggaacacgttcgggttttggttttgtttcgttcacctctgtctagatgcaacttttgttcctcctcccccaccccagcccccagcttcatgcttctcttccgcactcagccgccctgccctgtcctcgtggtgagtcgctgaccacggcttcccctgcagganccgccgggcgtgaaacgcggtccctcggtgcanacaccanggccgggcgcggctgggtccccgggggccctgtgaaaaaagtggcgntgaccgtggtaaacccagggnggtggcgtgggaatcncggttcntnacnctgggctgttttggtcancacgtgcaggtcaaggcagntcctntgaanccngnnccccttggccagcaaggnaaggntacagntaccttgcttttttttccgggggaaggggcctcccctttanggaagggccnaacggggaaagggggttattgttncctggnaacttgcntgggcnacccgggtnttntttaaatngncaagnnggtggggngggggccttccncttttctttantgggnttgccnnggggtcccntgaaancccctggggngggggggaaacccntgggncnttnttn

SEQ ID NO: 514 - DNA, 909 bp, Homo sapiens
  misc_feature (773)..(773): n is a, c, g, or t
  misc_feature (787)..(787): n is a, c, g, or t
  misc_feature (790)..(790): n is a, c, g, or t
  misc_feature (798)..(798): n is a, c, g, or t
  misc_feature (802)..(802): n is a, c, g, or t
  misc_feature (841)..(841): n is a, c, g, or t
  misc_feature (844)..(844): n is a, c, g, or t
  misc_feature (849)..(849): n is a, c, g, or t
  misc_feature (852)..(852): n is a, c, g, or t
  misc_feature (854)..(855): n is a, c, g, or t
  misc_feature (860)..(860): n is a, c, g, or t
  misc_feature (867)..(867): n is a, c, g, or t
  misc_feature (874)..(874): n is a, c, g, or t
  misc_feature (876)..(876): n is a, c, g, or t
  misc_feature (881)..(881): n is a, c, g, or t
  misc_feature (883)..(883): n is a, c, g, or t
  misc_feature (887)..(887): n is a, c, g, or t
  misc_feature (899)..(899): n is a, c, g, or t
ggaccgagggactgggagtcgttagtgaggatgacgcggcatggcaagaactgcaccgcaggggccgtctacacctaccacgagaagaagaaggacacagcggcctcgggctatgggacccagaacattcgactgagccgggatgccgtgaaggacttcgactgctgttgtctctccctgcagccttgccacgatcctgttgtcaccccagatggctacctgtatgagcgtgaggccatcctggagtacattctgcaccagaagaaggagattgcccggcagatgaaggcctacgagaagcagcggggcacccggcgcgaggagcagaaggagcttcagcgggcggcctcgcaggaccatgtgcggggcttcctggagaaggagtcggctatcgtgagccggcccctcaaccctttcacagccaaggccctctcgggcaccagcccagatgatgtccaacctgggcccagtgtgggtcctccaagtaaggacaaggacaaagtgctgcccagcttctggatcccgtcgctgacgcccgaagccaaggccaccaagctggagaagccgtcccgcacggtgacctgccccatgtcagggaagcccctgcgcatgtcggacctgacgcccgtgcacttcacaccgctagacagctccgtggaccgcgtggggctcatcacccgcagcgagcgctacgtgtgtgccgtgacccgcgacagcctgagcaacgccaccccctgcgctgtgctgcggccctctggggctgtggtcacccntcgaatgcgtgganaanctgattcngaanggacatggtggaaccctgtgactggaaaaaaactcacanacngcganatncnncttgnttgcaancggggcngntaccngncttncccgggcttccngaatgaaaac

SEQ ID NO: 515 - DNA, 896 bp, Homo sapiens
gcccacgcgtccgagaaagagctgcggagcaccattcttttcaatgcctacaaaaaggagatatttaccaccaacaatggctacaaatccatgcagaaaaaacttcggagtaattggaagattcagagcttaaaagatgaaatcacatctgagaagttaaatggagtgaaactgtggattacagctgggccaagggaaaaatttactgcagctgagtttgaaatcctgaagaaatatcttgacactggtggagatgtctttgtgatgctaggagaaggtggagaatccagatttgacaccaatattaactttttactagaagaatatggaatcatggttaataatgatgctgtggttagaaatgtatatcacaaatatttccatcctaaagaagctctagtttccagtggagtcttgaacagggctctcacctttgtgtatccttttggtgccacattgagtgtcatgaaaccagcagtggcggttctgtctacaggttctgtctgcttcccacttaacagacccattttggctttctatcactcaaagaaccaaggtgggaagctggcagtgcttggttcatgtcacatgttcagtgatcaatatttggacaaagaagaaaacagcaaaatcatggatgttgttttccagtggctcacgacaggagacatccacctaaaccagattgatgctgaggacccagagatttctgactacatgatgctgccctacacagccaccctatcaaagcggaatcgagagtgtctccaggagagtgatgagatcccaagggactttaccaccctcttcgacctgtccatcttccagctggataccacctccttccacagcgtcatcgaggctcacgagcagctaaatgtgaaacatgaaccact

SEQ ID NO: 516 - DNA, 854 bp, Homo sapiens
  misc_feature (264)..(264): n is a, c, g, or t
  misc_feature (339)..(339): n is a, c, g, or t
  misc_feature (394)..(394): n is a, c, g, or t
  misc_feature (457)..(457): n is a, c, g, or t
  misc_feature (471)..(471): n is a, c, g, or t
  misc_feature (552)..(552): n is a, c, g, or t
  misc_feature (605)..(605): n is a, c, g, or t
  misc_feature (630)..(630): n is a, c, g, or t
  misc_feature (664)..(664): n is a, c, g, or t
  misc_feature (666)..(666): n is a, c, g, or t
  misc_feature (678)..(678): n is a, c, g, or t
  misc_feature (704)..(704): n is a, c, g, or t
  misc_feature (722)..(722): n is a, c, g, or t
  misc_feature (741)..(741): n is a, c, g, or t
  misc_feature (750)..(750): n is a, c, g, or t
  misc_feature (755)..(755): n is a, c, g, or t
  misc_feature (758)..(758): n is a, c, g, or t
  misc_feature (764)..(766): n is a, c, g, or t
  misc_feature (769)..(769): n is a, c, g, or t
  misc_feature (772)..(772): n is a, c, g, or t
  misc_feature (779)..(779): n is a, c, g, or t
  misc_feature (781)..(781): n is a, c, g, or t
  misc_feature (789)..(789): n is a, c, g, or t
  misc_feature (797)..(797): n is a, c, g, or t
  misc_feature (810)..(812): n is a, c, g, or t
  misc_feature (816)..(816): n is a, c, g, or t
  misc_feature (819)..(819): n is a, c, g, or t
  misc_feature (821)..(822): n is a, c, g, or t
  misc_feature (824)..(824): n is a, c, g, or t
gggcgactctgctgcgccctgtcctccgtcggcatctgcgggctcccgggcctacagcggcctgcggcagaaatgcccctccgggctaggagcgacggcgccggcccgctatactcgcaccacctccccacctccccgctgcagaaagcgctgttggccgccggctccgcggcgatggcgctctataacccctaccgccacgacatggtcgcagttctaggggagaccacaggacaccgcaccctgaaggtcctcagggaccanatgaggagggatccagagggtgcccagatcctgcaggagcgtccccggatttcgacatccaccctcgacctgggnaagctccagagcctgccggaaggctccctcggtcgcgagtatctccgtttcctgnatgtgaacagggtctccccagacacccgagcacccacccgcttcgtggatgatgaggagctancgtatgtgattcancggtaccgggaggtgcacgacatgcttcacaccctgctggggatgcccaccaacatcctgggggagatcgtggtgaaatgntttgaggctgtccagactggcctgcccatgtgcatcctgggtgcattctttgnaaccgatccgacttgtcgctcaaancctgcaagtgctggtctcggatttgatcccatgngnccgttcaaaacnggcgcaaaaccccatgtgtcctcaanctgtactatgagcgggcngttgggagcattccctganggctctgcngggangancttggnnnttnaangcaactncncatgccantccagggntttggcctgaacnnntgancangnngnggtcatggccaaacctcccccaacccttga

SEQ ID NO: 517 - DNA, 786 bp, Homo sapiens
  misc_feature (762)..(762): n is a, c, g, or t
  misc_feature (764)..(786): n is a, c, g, or t
gctagccgtcgcttacctaggatgccgcgtggaagccgaagccgcacctcccgcatggcccctccggccagccgggcccctcagatgagagctgcacccaggccagcaccagtcgctcagccactagcagcggcacccccatctgcagttggctcttctgctgctgcgccccggcagccaggtctgatggcccagatggcaaccactgcagctggcgtggctgtgggctctgctgtggggcacacattgggtcacgccattactgggggcttcagtggaggaagtaatgctgagcctgcgaggcctgacatcacttaccaggagcctcagggaacccagccagcacagcagcagcagccttgcctctatgagatcaaacagtttctggagtgtgcccagaaccagggtgacatcaagctctgtgagggtttcaatgaggtgctgaaacagtgccgacttgcaaacggattggcctaatgaagaagttcaacctggagagatggaaaatcagctctcataactaagttaatttagtataaaaatagaattgatagtgagggtataaagtgtaaccatcagttaaacctctcctgtcattcctggcttccttgcttcagaattgaaatggaagtgggggtgtccctactctgtagaatctgggactgggcaaatgtttgtgtggcctccttaaactagctgttatgttatgattttattctttgtgagttaattagaataaagtcattttcttccaaaaaaaanannnnnnnnnnnnnnnnnnnnnnn

SEQ ID NO: 518 - DNA, 939 bp, Homo sapiens
  misc_feature (796)..(796): n is a, c, g, or t
  misc_feature (823)..(823): n is a, c, g, or t
  misc_feature (832)..(832): n is a, c, g, or t
  misc_feature (881)..(881): n is a, c, g, or t
  misc_feature (896)..(896): n is a, c, g, or t
  misc_feature (904)..(904): n is a, c, g, or t
  misc_feature (910)..(912): n is a, c, g, or t
  misc_feature (917)..(930): n is a, c, g, or t
gatttggaacattatctggacagtattgaaaaccttccctttgaattacagagaaactttcagctcatgagggacctagaccaaagaacagaggacctgaaggctgaaattgacaagttggccactgagtatatgagtagtgcccgcagcctgagctccgaggaaaaattggcccttctcaaacagatccaggaagcctatggcaagtgcaaggaatttggtgacgacaaggtgcagcttgccatgcagacctatgagatggtggacaaacacattcggcggctggacacagacctggcccgttttgaggctgatctcaaggagaaacagattgagtcaagtgactatgacagctcttccagcaaaggcaaaaagaaaggccggactcaaaaggagaagaaagctgctcgtgctcgttccaaagggaaaaactcggatgaagaagcccccaagactgcccagaagaagttaaagctcgtgcgcacaagtcctgagtatgggatgccctcagtgacctttggcagtgtccacccctctgatgtgttggatatgcctgtggatcccaacgaacccacctattgcctttgtcaccaggtctcctatggagagatgattggctgtgacaaccctgattgttccattgagtggttccattttgcctgtgtggggctgacaaccaagcctcgggggaaatggttttgcccacgctgctcccaagaacggaagaagaaatagataagggccttggattccaacacagtttcttccacatcccctgacttgggctagtgggcanaggaatgcctgtgcccaagaggatccntcctggganagggggccaaggtggaatgcaaatactcccatgtaaaaggaacttgggntaggtaaaataaaancttatacntgtttnnnaaaannnnnnnnnnnnnnaggggcggc

SEQ ID NO: 519 - DNA, 1040 bp, Homo sapiens
  misc_feature (655)..(655): n is a, c, g, or t
  misc_feature (782)..(782): n is a, c, g, or t
  misc_feature (791)..(791): n is a, c, g, or t
  misc_feature (814)..(814): n is a, c, g, or t
  misc_feature (831)..(831): n is a, c, g, or t
  misc_feature (842)..(842): n is a, c, g, or t
  misc_feature (857)..(857): n is a, c, g, or t
  misc_feature (869)..(869): n is a, c, g, or t
  misc_feature (872)..(872): n is a, c, g, or t
  misc_feature (881)..(881): n is a, c, g, or t
  misc_feature (883)..(885): n is a, c, g, or t
  misc_feature (897)..(897): n is a, c, g, or t
  misc_feature (908)..(908): n is a, c, g, or t
  misc_feature (915)..(915): n is a, c, g, or t
  misc_feature (920)..(920): n is a, c, g, or t
  misc_feature (935)..(935): n is a, c, g, or t
  misc_feature (941)..(941): n is a, c, g, or t
  misc_feature (950)..(950): n is a, c, g, or t
  misc_feature (954)..(954): n is a, c, g, or t
  misc_feature (958)..(958): n is a, c, g, or t
  misc_feature (965)..(965): n is a, c, g, or t
  misc_feature (978)..(978): n is a, c, g, or t
  misc_feature (981)..(982): n is a, c, g, or t
  misc_feature (986)..(986): n is a, c, g, or t
  misc_feature (993)..(993): n is a, c, g, or t
  misc_feature (1000)..(1000): n is a, c, g, or t
  misc_feature (1008)..(1008): n is a, c, g, or t
  misc_feature (1010)..(1010): n is a, c, g, or t
  misc_feature (1013)..(1013): n is a, c, g, or t
  misc_feature (1021)..(1021): n is a, c, g, or t
  misc_feature (1030)..(1030): n is a, c, g, or t
  misc_feature (1033)..(1034): n is a, c, g, or t
  misc_feature (1037)..(1037): n is a, c, g, or t
ggatccggcggccacccagaggagaaggccaccccgcctggaggcacaggccatgaggggctctcaggaggtgctgctgatgtggcttctggtgttggcagtgggcggcacagagcacgcctaccggcccggccgtagggtgtgtgctgtccgggctcacggggaccctgtctccgagtcgttcgtgcagcgtgtgtaccagcccttcctcaccacctgcgacgggcaccgggcctgcagcacctaccgaaccatctataggaccgcctaccgccgcagccctgggctggcccctgccaggcctcgctacgcgtgctgccccggctggaagaggaccagcgggcttcctggggcctgtggagcagcaatatgccagccgccatgccggaacggagggagctgtgtccagcctggccgctgccgctgccctgcaggatggcggggtgacacttgccagtcagatgtggatgaatgcagtgctaggaggggcggctgtccccagcgctgcgtcaacaccgccggcagttactggtgccagtgttgggaggggcacagcctgtctgcagacggtacactctgtgtgcccaagggagggccccccagggtggcccccaacccgacaggagtggacagtgcaatgaaggaagaagtgcanaggctgcagtccagggtggacctgctggaggagaagctgcagctggtgctggccccactgcacagcctggcctcgcaggcactggagcatgggctcccggaaccccggcagcctcctggtgcactcnttccagcanctcggccgcatcgactccctgancgagcaaatttctttcntggaagaacanctggggtcctgctcntgcaaaaaaaantcntgactgccnannncccaggctggantgaacccttangccgccntgaanccccatgccctgccnaaatgntgggggtcnaaancacntcgggtnaatgaacgaaagncannaggncttctcntttctcncccttctngnagntccaaacntggatgganggnnggnatt

SEQ ID NO: 520 - DNA, 822 bp, Homo sapiens
  misc_feature (748)..(748): n is a, c, g, or t
  misc_feature (794)..(795): n is a, c, g, or t
  misc_feature (799)..(799): n is a, c, g, or t
  misc_feature (802)..(806): n is a, c, g, or t
  misc_feature (808)..(808): n is a, c, g, or t
  misc_feature (811)..(811): n is a, c, g, or t
  misc_feature (813)..(822): n is a, c, g, or t
gcggacgggccctgctgctcgcatcccagcgcggtgctcggcgtacagcagacgctggaggagatggacttcgagaggggaatctggtcggcagccctgaatggagacctgggccgagtgaagcatttaatccagaaggccgaggacccaagtcagcccgactcggccggctacactgcgctgcactatgccagccgcaatgggcactacgctgtgtgccagttcctgctggaaagcggagctaagtgtgatgcccagacccacgggggtgccactgctctgcaccgagccagctactgcgggcacactgaaatcgcgcggctcctgctatcacatgggtccaaccccagggtggtggatgacgacggcatgaccagtctgcataaggctgctgagaggggtcacggggacatctgctccctcctcctgcaacacagcccagccctgaaggccatccgggaccgaaaggcacggctagcatgtgacctgctgccttgcaacagtgacctgcgggacctgctatccagctgagccgccaccctatctccagctgcctttaaagggtacacagaccagttctccaagcccctgccttggtcagcatccatgctgctgggcagggaactgaggccagaccacccaggaagagccccagtctggtcactgtggaagcgagggagtagatttggtgtggctaaaagtgtttaagactggacagatgatcatattctaaattagttcatatganacatctatttatttggaaaaaaaataaaagttatatccttacctcnnaaanaannnnnanaanannnnnnnnnn

SEQ ID NO: 521 - DNA, 1059 bp, Homo sapiens
  misc_feature (721)..(721): n is a, c, g, or t
  misc_feature (729)..(729): n is a, c, g, or t
  misc_feature (739)..(739): n is a, c, g, or t
  misc_feature (778)..(778): n is a, c, g, or t
  misc_feature (786)..(786): n is a, c, g, or t
  misc_feature (819)..(819): n is a, c, g, or t
  misc_feature (821)..(821): n is a, c, g, or t
  misc_feature (831)..(831): n is a, c, g, or t
  misc_feature (835)..(835): n is a, c, g, or t
  misc_feature (843)..(843): n is a, c, g, or t
  misc_feature (845)..(845): n is a, c, g, or t
  misc_feature (849)..(849): n is a, c, g, or t
  misc_feature (854)..(854): n is a, c, g, or t
  misc_feature (861)..(861): n is a, c, g, or t
  misc_feature (863)..(863): n is a, c, g, or t
  misc_feature (888)..(888): n is a, c, g, or t
  misc_feature (898)..(898): n is a, c, g, or t
  misc_feature (904)..(904): n is a, c, g, or t
  misc_feature (906)..(906): n is a, c, g, or t
  misc_feature (919)..(919): n is a, c, g, or t
  misc_feature (922)..(922): n is a, c, g, or t
  misc_feature (926)..(926): n is a, c, g, or t
  misc_feature (931)..(931): n is a, c, g, or t
  misc_feature (934)..(936): n is a, c, g, or t
  misc_feature (938)..(939): n is a, c, g, or t
  misc_feature (942)..(942): n is a, c, g, or t
  misc_feature (952)..(953): n is a, c, g, or t
  misc_feature (955)..(955): n is a, c, g, or t
  misc_feature (962)..(962): n is a, c, g, or t
  misc_feature (992)..(992): n is a, c, g, or t
  misc_feature (1002)..(1002): n is a, c, g, or t
  misc_feature (1011)..(1011): n is a, c, g, or t
  misc_feature (1020)..(1020): n is a, c, g, or t
  misc_feature (1023)..(1023): n is a, c, g, or t
  misc_feature (1046)..(1046): n is a, c, g, or t
gagacacttccggttgcgacggaggtaggcttacgaggcctgtgtcgggtagaaagggtccttcctggaccgggaccctctgccacgaccatggaccgtaggaaaaagcctttggacgtcacggcctcctcgttggtagatcttaaggctgaactcttccgaaagcaagaagaattcaaacaagaaaaacttctaaaagattctggagtttttggaaaaccaaaaacaactaacaagaaaccaagtatctggagcaaacagaatgtaggcgtttcaaatcgagctgagaaggatgctgaacagaagattgaagaacagaagactttagacaaagcaagggaaaaattggaagaaaaagccaaattatatgaaaaaatgactaaaggagactttatagatgaagaagtagaggatatgtaccttgtggatttcacacagaagatcatagacaagcgcaaagaaatggaggcatctggtgcccatagagattctcaaaaggcaggagaaagggacgacgatgaggaaaaccttcctgagggagagatccctcctccccaagaccccagtgaagaatgggtggattacgtggactctttggggcgttcccggcgctgtatgagaaaggatttgccagatctgctggagatggataaaaatcttcaggggagactgtaagtgtgtgtggtatacagagctctgccaaggtctgaaaatgcagccncagggatngttttgtganggggaggctgttttataattaatgatctctgttgctccngtaagganatattgattgattgattgattgatggattggancnctttttaagnggtnagcatgcncntccnccccntaatccncncttggggaacaaccctgactggggnatgaataaanctgtcncntttttacttgganggntgtnggccnccnnntnnccnaataaccccnncngaacccnccaaccccggcttttggggaaaacaagggntttgaaaaanacccttgantttcccccnaanagggggcccccgggaaaaaactnaccccctttttct

SEQ ID NO: 522 - DNA, 708 bp, Homo sapiens
gcccacgcgtccgactggagaagggaggcggcgggcgaagcgcacgtcgagcgggggagcggcgctgcctgtggagatccgcggaggccgacaggattcgttggctgccgtccccgctgctgtgcattgggttaaaaacgacaaccaacatcagccatgaaagatccaagtcgcagcagtactagcccaagcatcatcaatgaagatgtgattattaacggtcattctcatgaagatgacaatccatttgcagagtacatgtggatggaaaatgaagaagaattcaacagacaaatagaagaggagttatgggaagaagaatttattgaacgctgtttccaagaaatgctggaagaggaagaagagcatgaatggtttattccagctcgagatctcccacaaactatggaccaaatccaagaccagtttaatgaccttgttatcagtgatggctcttctctggaagatcttgtggtcaagagcaatctgaatccaaatgcaaaggagtttgttcctggggtgaagtacggaaatatttgagtagacggggccctcttttggtggatgtagcacaatttccacactgtgaaggcagtattagaagacttaattgtaaaagctctcttgtcactgtgttacacttatgcattgccaaaagtttttgttagtcttgcatgcttaataaaagtgctgagactgttactaagt

SEQ ID NO: 523 - DNA, 1086 bp, Homo sapiens
  misc_feature (699)..(699): n is a, c, g, or t
  misc_feature (729)..(729): n is a, c, g, or t
  misc_feature (744)..(744): n is a, c, g, or t
  misc_feature (757)..(757): n is a, c, g, or t
  misc_feature (770)..(770): n is a, c, g, or t
  misc_feature (790)..(790): n is a, c, g, or t
  misc_feature (800)..(800): n is a, c, g, or t
  misc_feature (824)..(824): n is a, c, g, or t
  misc_feature (836)..(836): n is a, c, g, or t
  misc_feature (885)..(886): n is a, c, g, or t
  misc_feature (889)..(889): n is a, c, g, or t
  misc_feature (898)..(898): n is a, c, g, or t
  misc_feature (902)..(902): n is a, c, g, or t
  misc_feature (907)..(907): n is a, c, g, or t
  misc_feature (928)..(928): n is a, c, g, or t
  misc_feature (945)..(945): n is a, c, g, or t
  misc_feature (953)..(953): n is a, c, g, or t
  misc_feature (956)..(956): n is a, c, g, or t
  misc_feature (988)..(988): n is a, c, g, or t
  misc_feature (993)..(993): n is a, c, g, or t
  misc_feature (996)..(996): n is a, c, g, or t
  misc_feature (998)..(998): n is a, c, g, or t
  misc_feature (1002)..(1002): n is a, c, g, or t
  misc_feature (1006)..(1006): n is a, c, g, or t
  misc_feature (1010)..(1010): n is a, c, g, or t
  misc_feature (1014)..(1014): n is a, c, g, or t
  misc_feature (1020)..(1020): n is a, c, g, or t
  misc_feature (1038)..(1039): n is a, c, g, or t
  misc_feature (1047)..(1047): n is a, c, g, or t
  misc_feature (1053)..(1053): n is a, c, g, or t
  misc_feature (1064)..(1064): n is a, c, g, or t
  misc_feature (1075)..(1075): n is a, c, g, or t
gggctggtttgcgtcgacatggcggttaccctgagtctcttgctgggcgggcgcgtttgcgccgccgtcactcgctgtgggttcgcgacccggggggtggcgggcccaggccctattggccgggagccggaccccgattccgactgggagccggaggaacgggagctgcaggaggtggagaggtaccggcttctccccgggccctcagcttgaagcagggcctcgtgccccggcgctccaggccgcgcccccttggcgccgggtgtcctgccgctgcttgcgcagcggcccttgtttcttcttacccgttgttaggggcgcagcgtcaggtgttcagctcccctgggaccactggtcccttcattagtgacgtatttcatcatcagtttagagagttcggcatgcttacaggcagttattgttctaggtgttagctttctgggtgtacggagcagctctaagccggcaacatggcccggttgcccttgcgatcaaagagaagagggctgggcgctccatgatttagcctgaggctcttcaaacatccattctgcttccacgcatggcttctgccattggttctcttcccccagcaccctgaaacgacagaaacaagcaatccgattccagaaaattcggaggcaaatggaggcgcctggtgccccgcccaggaccctgacgtgggaagccatggagcanatacggtatttacatgaggaatttccagantcctggtcagttccnaggttggctgaangctttgatgtcancactgatgtgatccgaaaanttttaaaaancaagttttttaacccacattggancaaaagctgaancaggatcaaaaaagtccttaaaaaagctgggcttgcccactcgctgcannaanctccggggntctngaaanacctcaaaactgctcccttgnaggccaatttgtatcangctctttnctnatgccagggcataaacccccattaaaaaaccnaatcnaangnaaantttnaaangganaaatcnaaaactcccaggaaaaannaccccagnaaaagnaaggaaaaaanaaaaaaatccngaacttgaaaa

SEQ ID NO: 524 - DNA, 1187 bp, Homo sapiens
  misc_feature (869)..(869): n is a, c, g, or t
  misc_feature (889)..(889): n is a, c, g, or t
  misc_feature (892)..(892): n is a, c, g, or t
  misc_feature (900)..(900): n is a, c, g, or t
  misc_feature (938)..(938): n is a, c, g, or t
  misc_feature (950)..(950): n is a, c, g, or t
  misc_feature (971)..(971): n is a, c, g, or t
  misc_feature (983)..(983): n is a, c, g, or t
  misc_feature (985)..(987): n is a, c, g, or t
  misc_feature (993)..(993): n is a, c, g, or t
  misc_feature (999)..(999): n is a, c, g, or t
  misc_feature (1010)..(1010): n is a, c, g, or t
  misc_feature (1016)..(1016): n is a, c, g, or t
  misc_feature (1023)..(1023): n is a, c, g, or t
  misc_feature (1051)..(1052): n is a, c, g, or t
  misc_feature (1054)..(1054): n is a, c, g, or t
  misc_feature (1058)..(1058): n is a, c, g, or t
  misc_feature (1062)..(1062): n is a, c, g, or t
  misc_feature (1065)..(1065): n is a, c, g, or t
  misc_feature (1070)..(1070): n is a, c, g, or t
  misc_feature (1087)..(1087): n is a, c, g, or t
  misc_feature (1101)..(1101): n is a, c, g, or t
  misc_feature (1109)..(1109): n is a, c, g, or t
  misc_feature (1112)..(1112): n is a, c, g, or t
  misc_feature (1119)..(1119): n is a, c, g, or t
  misc_feature (1125)..(1125): n is a, c, g, or t
  misc_feature (1131)..(1131): n is a, c, g, or t
  misc_feature (1147)..(1147): n is a, c, g, or t
  misc_feature (1169)..(1169): n is a, c, g, or t
  misc_feature (1180)..(1180): n is a, c, g, or t
  misc_feature (1187)..(1187): n is a, c, g, or t
gggtacctgctctgcgaactggtgtctgacgacccccgctgccgcctaagcctcgatgaccgagttctgagcagcctcgtacgggacacgatcgccagggtgcacggaactttcggcgcagccgcctgctccatcggcttcgcgggtgcaagggcgctgggggaagaggggaacccgggaggatggcgggatgtggagggggcaggcgccggaggaagaaagaaggggcacgagtggccaagcccgtgcaccgttttttgtaaggtatctctttaagcgcctgggaccccaagcgagagtccgaaattagcagagcgctaaaaggaggggcccgaaggcagtggggctttgagctagaagcctctttttacctgcttgacaggtaatttctgtaattggttgtgattgaatttgatagggtagagaattaaatgagggaagctgtgtatacttcctagtaagagctattatatgaccgattacattaacatcatatggaaaaaaattgtcaaaagtactccgggaaagcccttaaatagttggtaaagtacagaacacatgattgtcaatatatgtaaatacaggatgagctaggacagaggggcccttctttcacaccacttaaattagttcccactttaaccttgtttgagattgacttctggagagttaaatgcagatagacttaactctcctaagtcaggtgagactgagagctgactgctacaataaattacggagcccaaatgcagtaaaacagcctgtttttcaggcaagggttttgtgggggttttttcctaaaattaaaacggatcgcctcctacctgctcctatttattgaattaactagtgaattaaaaagcatttcnattctaaattcattccccanttntgaatggngtgcaacacagtggggggtttggcttttccctttaacnccctgaaaaatntaagtgcccttgcctaaaaanatactttttggnannnaaatangccctnttaccccaaanttttcnttttttncaaaaaaatctgggctttttcccaagcnngntggnaggnccncaccnaaaacgggggtcattgntgcccccgcccccnggggttcnggnaattccngccccncccccngggggggggaaataanggggcccccccccccccctaanttttttttttntaaaaan

SEQ ID NO: 525 - DNA, 1217 bp, Homo sapiens
  misc_feature (664)..(664): n is a, c, g, or t
  misc_feature (675)..(675): n is a, c, g, or t
  misc_feature (723)..(723): n is a, c, g, or t
  misc_feature (769)..(769): n is a, c, g, or t
  misc_feature (772)..(772): n is a, c, g, or t
  misc_feature (782)..(782): n is a, c, g, or t
  misc_feature (792)..(792): n is a, c, g, or t
  misc_feature (799)..(799): n is a, c, g, or t
  misc_feature (806)..(806): n is a, c, g, or t
  misc_feature (817)..(817): n is a, c, g, or t
  misc_feature (822)..(822): n is a, c, g, or t
  misc_feature (831)..(831): n is a, c, g, or t
  misc_feature (836)..(836): n is a, c, g, or t
  misc_feature (838)..(838): n is a, c, g, or t
  misc_feature (846)..(846): n is a, c, g, or t
  misc_feature (855)..(855): n is a, c, g, or t
  misc_feature (858)..(858): n is a, c, g, or t
  misc_feature (874)..(874): n is a, c, g, or t
  misc_feature (884)..(885): n is a, c, g, or t
  misc_feature (897)..(898): n is a, c, g, or t
  misc_feature (902)..(902): n is a, c, g, or t
  misc_feature (907)..(907): n is a, c, g, or t
  misc_feature (909)..(909): n is a, c, g, or t
  misc_feature (923)..(924): n is a, c, g, or t
  misc_feature (985)..(986): n is a, c, g, or t
  misc_feature (1014)..(1014): n is a, c, g, or t
  misc_feature (1020)..(1021): n is a, c, g, or t
  misc_feature (1023)..(1023): n is a, c, g, or t
  misc_feature (1026)..(1026): n is a, c, g, or t
  misc_feature (1029)..(1029): n is a, c, g, or t
  misc_feature (1045)..(1045): n is a, c, g, or t
  misc_feature (1051)..(1051): n is a, c, g, or t
  misc_feature (1067)..(1068): n is a, c, g, or t
  misc_feature (1072)..(1072): n is a, c, g, or t
  misc_feature (1075)..(1075): n is a, c, g, or t
  misc_feature (1083)..(1083): n is a, c, g, or t
  misc_feature (1086)..(1086): n is a, c, g, or t
  misc_feature (1092)..(1092): n is a, c, g, or t
  misc_feature (1100)..(1100): n is a, c, g, or t
  misc_feature (1116)..(1116): n is a, c, g, or t
  misc_feature (1122)..(1122): n is a, c, g, or t
  misc_feature (1126)..(1126): n is a, c, g, or t
  misc_feature (1132)..(1132): n is a, c, g, or t
  misc_feature (1134)..(1134): n is a, c, g, or t
  misc_feature (1141)..(1142): n is a, c, g, or t
  misc_feature (1149)..(1149): n is a, c, g, or t
  misc_feature (1154)..(1154): n is a, c, g, or t
  misc_feature (1171)..(1172): n is a, c, g, or t
  misc_feature (1175)..(1175): n is a, c, g, or t
  misc_feature (1181)..(1181): n is a, c, g, or t
  misc_feature (1202)..(1202): n is a, c, g, or t
gcaaagcaggaccttgcttatgaacgtcagtatgaacagcaaacctatcaggtgatccctgaggtgatcaaaaacttcatccagtatttccacaaaactgtctcagatttgattgaccagaaagtgtatgagctacaggccagtcgtgtctccagtgatgtcattgaccagaaggtgtatgagatccaggacatctatgagaacagctggaccaagctgactgaaagattcttcaagaatacaccttggcccgaggctgaagccattgctccacaggttggcaatgatgctgtcttcctgattttatacaaagaattatactacaggcacatatatgccaaagtcagtgggggaccttccttggagcagaggtttgaatcctattacaactactgcaatctcttcaactacattcttaatgccgatggtcctgctccccttgaactacccaaccagtggctctgggatattatcgatgagttcatctaccagtttcagtcattcagtcagtaccgctgtaagactgccaagaagtcagaggaggagattgactttcttcgttccaatcccaaaatctggaatgttcatagtgtcctcaatgtccttcattccctggtagacaaatccaacatcaaccgacagttggaggtatacacaagcggangtgaccctganagtgtggctggggagtatgggcggcactccctctacaaaatgcttggntacttcagcctggtcgggcttctccgcctgcactccctgttagganatnactaccaggnccatcaaggngctgganaacatcnaactgaacaanaaaantatgtattncccgngngccaaagngccaggtcnccncaaaactaattatgtngggttggcannttgaaagaaggnncccnttacnanaaggccatccgggnnttccccaaaaatcctcctttaaattcaaaagaacaaaaaaccatgttcccaaagaaccccnntacagtttggaaaatgattaaacacccnaatggnncnaangcntggccctgctgggccntgcccncccaaaggtacccccnngggnatnggaggaanaantccccncccccggnggaaaaaaaatggggnaaaaantttngccctncnaaagggnncccccanttttnaaaaaattttttttttnnccnccccanttctggccccgggggggcccnaaaaaaaggcccccc

SEQ ID NO: 526 - DNA, 1025 bp, Homo sapiens
  misc_feature (709)..(709): n is a, c, g, or t
  misc_feature (760)..(760): n is a, c, g, or t
  misc_feature (784)..(784): n is a, c, g, or t
  misc_feature (792)..(792): n is a, c, g, or t
  misc_feature (798)..(798): n is a, c, g, or t
  misc_feature (816)..(816): n is a, c, g, or t
  misc_feature (834)..(834): n is a, c, g, or t
  misc_feature (861)..(861): n is a, c, g, or t
  misc_feature (869)..(869): n is a, c, g, or t
  misc_feature (883)..(883): n is a, c, g, or t
  misc_feature (892)..(892): n is a, c, g, or t
  misc_feature (897)..(897): n is a, c, g, or t
  misc_feature (903)..(903): n is a, c, g, or t
  misc_feature (912)..(912): n is a, c, g, or t
  misc_feature (932)..(932): n is a, c, g, or t
  misc_feature (934)..(934): n is a, c, g, or t
  misc_feature (943)..(943): n is a, c, g, or t
  misc_feature (946)..(946): n is a, c, g, or t
  misc_feature (951)..(951): n is a, c, g, or t
  misc_feature (958)..(958): n is a, c, g, or t
  misc_feature (960)..(960): n is a, c, g, or t
  misc_feature (965)..(965): n is a, c, g, or t
  misc_feature (973)..(973): n is a, c, g, or t
  misc_feature (977)..(977): n is a, c, g, or t
  misc_feature (981)..(981): n is a, c, g, or t
  misc_feature (985)..(985): n is a, c, g, or t
  misc_feature (990)..(990): n is a, c, g, or t
  misc_feature (995)..(995): n is a, c, g, or t
  misc_feature (998)..(998): n is a, c, g, or t
  misc_feature (1006)..(1006): n is a, c, g, or t
  misc_feature (1015)..(1017): n is a, c, g, or t
  misc_feature (1019)..(1019): n is a, c, g, or t
ggtcccaaggctgacttccccaccacagtggggctgctggccgcggaggaggggggcgggctggagctggagggggacaaagagaagaaagggaagatcttccacatcgacaccaatgccctgcacgtgcctcgggatggagcggaggtcatgtcgcccctcaagaatggcatgatcgaggactgggagtgcttccgagccatcctggatcacacctacagcaaacacgtcaagtctgagccaaacctgcacccagtgctcatgtccgaggctccgtggaacacacgggccaagcgggagaagctgacagagctgatgttcgagcagtacaacattcctgccttcttcttatgcaagacggctgtgctcaccgcctttgcaaacgggcggtccactggcctcgtgctggacagtggagccacccacaccacggccattccagtacatgacggctacgttctgcagcaaggcatcgtcaagtcccctctggcaggggacttcatctccatgcagtgccgggagctgttccaggagatggccattgacatcatcccaccttacatgatcgcagccaaggagcctgtccgggagggtgcccccccaaactggaagaagaaggagaagctaccccaggtctccaagtcctggcataactacatgtgtaatgaggtgatccaggacttccaggcctccgtgctgcaggtctcanactccccctacgatgaacaggtggctgcacaaatgcccacagtgcactacnagatgcccaatggctacaatacanactacggngccgancgactccgcatccctganggcctgtttgatccctcnaacgtcaagggcctgtcgggaaaaccntgttgggngtgggccacgtggngaccaccancatcngcatgngtgaaattnatattccccccgggcctgtnanggaatgtcnttntcccnggggaananactgntgcagggnttcntganaggntcaancaaanttnccaaaaanccccccgannngnaatgaa

SEQ ID NO: 527 - DNA, 1093 bp, Homo sapiens
  misc_feature (916)..(916): n is a, c, g, or t
  misc_feature (918)..(918): n is a, c, g, or t
  misc_feature (924)..(924): n is a, c, g, or t
  misc_feature (932)..(933): n is a, c, g, or t
  misc_feature (946)..(946): n is a, c, g, or t
  misc_feature (961)..(961): n is a, c, g, or t
  misc_feature (964)..(964): n is a, c, g, or t
  misc_feature (976)..(976): n is a, c, g, or t
  misc_feature (996)..(996): n is a, c, g, or t
  misc_feature (999)..(999): n is a, c, g, or t
  misc_feature (1010)..(1010): n is a, c, g, or t
  misc_feature (1026)..(1026): n is a, c, g, or t
  misc_feature (1050)..(1050): n is a, c, g, or t
  misc_feature (1064)..(1064): n is a, c, g, or t
  misc_feature (1090)..(1090): n is a, c, g, or t
gagacaaccctgtgcaagcccctgttcccaagggaacatcagttctacgagaccctccctgctgagatgcgcaaattcactccccagtacaaaggtgtggtatctgtgcgctttgaagaagatgaagacaggaacttgtgtctaatagcatatccattgaaaggggaccatggaattgtggacattgtagataattcagactgtgaaccaaaaagtaagctcctaaggtggacaacaaacaaaaaacatcatgtcttagaaacagaaaagacccctaaggactgggtgcgtcagcaccgtaaagaggagaaaatgaagagccataagttagaagaagaatttgagtggctaaagaaatctgaagtcttgtactacactgtagagaagaaggggaatataagttcccagcttaaacactataacccttggagcatgaaatgtcaccagcaacagttacagagaatgaaggagaatgcaaagcatcggaaccagtacaaatttatcttactggaaaacctgacttcccgctatgaggtgccttgtgtccttgacctcaagatgggcacacgacaacatggtgatgatgcttcagaggagaaggcagccaaccagatccgaaaatgtcagcagagcacatctgcagtcattggtgtgcgtgtgtgtggcatgcaggtgtaccaagcaggcagtgggcagctcatgttcatgaacaagtaccatggacggaagctatcggtgcagggcttcaaggaggcacttttccagttcttccacaatgggcggtacctgcgccgtgaactcctgggccctgtgctcaagaagctgactgagctcaaggcagtgttggagcgacaggagtcctaccgcttctactcaagctcctgctggtcatttatgatggcaaggagcggccccnantggtcntggactcnnatgctgaggattnggaggacctgtcaangantcacctgatgantctgctgggcctatgcctanaanccatcggcccngctctgtaatgtgccntgatcaatttgccccccccctgcngctttttggcaagnaccctggggctgaggccagatgctgnttt

SEQ ID NO: 528 - DNA, 907 bp, Homo sapiens
  misc_feature (717)..(717): n is a, c, g, or t
  misc_feature (744)..(744): n is a, c, g, or t
  misc_feature (815)..(815): n is a, c, g, or t
  misc_feature (842)..(842): n is a, c, g, or t
  misc_feature (847)..(847): n is a, c, g, or t
  misc_feature (862)..(862): n is a, c, g, or t
  misc_feature (884)..(907): n is a, c, g, or t
gccaagatggcggatgaagccacgcgacgtgttgtgtctgagatcccggtgctgaagactaacgccggaccccgagatcgtgagttgtgggtgcagcgactgaaggaggaatatcagtcccttatccggtatgtggagaacaacaagaatgctgacaacgattggttccgactggagtccaacaaggaaggaactcggtggtttggaaaatgctggtatatccatgacctcctgaaatatgagtttgacatcgagtttgacattcctatcacatatcctactactgccccagaaattgcagttcctgagctggatggaaagacagcaaagatgtacaggggtggcaaaatatgcctgacggatcatttcaaacctttgtgggccaggaatgtgcccaaatttggactagctcatctcatggctctggggctgggtccatggctggcagtggaaatccctgatctgattcagaagggcgtcatccaacacaaagagaaatgcaaccaatgaagaatcaagccactgaggcagggcagagggacctttgataggctacgatactattttcctgtgcatcacacttaactcatctaactgcttccccggacaccctccacctctagttgttactaagtagctgcagtaggcattgctggggaagaaacaaacacacaccaaacagtactgctacttagtttctaaggctgcacagggaanggaaagactgggctttggacaatctanaggtaatttatatccgcccccaggtggagcaacatgcgattctggaggcacggggggtaactgaaagtgantacatatagtctttctggtttctgganaaaancccatcaataaaaanctgcttcctctggtaaaaaaannnnnnnnnnnnnnnnnnnnnnnn

SEQ ID NO: 529 - DNA, 868 bp, Homo sapiens
  misc_feature (759)..(759): n is a, c, g, or t
  misc_feature (766)..(766): n is a, c, g, or t
  misc_feature (788)..(788): n is a, c, g, or t
  misc_feature (794)..(794): n is a, c, g, or t
  misc_feature (806)..(806): n is a, c, g, or t
  misc_feature (810)..(810): n is a, c, g, or t
  misc_feature (815)..(815): n is a, c, g, or t
  misc_feature (819)..(819): n is a, c, g, or t
  misc_feature (821)..(821): n is a, c, g, or t
  misc_feature (823)..(823): n is a, c, g, or t
  misc_feature (826)..(826): n is a, c, g, or t
  misc_feature (828)..(828): n is a, c, g, or t
  misc_feature (831)..(831): n is a, c, g, or t
  misc_feature (834)..(834): n is a, c, g, or t
  misc_feature (842)..(842): n is a, c, g, or t
  misc_feature (849)..(849): n is a, c, g, or t
  misc_feature (854)..(855): n is a, c, g, or t
  misc_feature (858)..(858): n is a, c, g, or t
gcccacgcgtccgaatttctcttggacaaatctgcagaaaaggctcttgggaaggcagcatctcacattaaaagcattaagaatgtgacagagctgaagctttctgataatcctgcctgggaaggggataaaggaaacactaaaggtgacaagcacgatgacctccagcgggcgcgtttcatctgccccgttgtgggcctggagatgaacggccgacacaggttctgcttccttcggtgctgcggctgtgtgttttctgagcgagccttgaaagagataaaagcggaagtttgccacacgtgtggggctgccttccaggaggatgatgtcatcgtgctcaatggcaccaaggaggatgtggacgtgctgaagacaaggatggaggagagaaggctgagagcgaagctggaaaagaaaacaaagaaacccaaggcagcagagtctgtttcaaaaccagatgtcagtgaagaagccccagggccatcaaaagttaagacagggaagcctgaagaagccagccttgattctagagagaagaaaaccaacttggctcccaaaagcacagcaatgaatgagagctcttctggaaaagctgggaagcctccgtgtggagccacaaagaggtccatcgctgacagtgaagaatcggaggcctacaagtccctctttaccactcacagctccgccaagcgctccaaggaggagtctgccccactgggtcacccacacgtcctactgcttctgaagcccgcactgccnccgctcntgccccaaaaaggttgtttaantttccncgtaaggcaggncccntttgngccncngnaangnccngcnggggggtnccccccnaaaanntcnggggcaaaaa

SEQ ID NO: 530 - DNA, 1071 bp, Homo sapiens
  misc_feature (739)..(739): n is a, c, g, or t
  misc_feature (790)..(790): n is a, c, g, or t
  misc_feature (796)..(796): n is a, c, g, or t
  misc_feature (808)..(808): n is a, c, g, or t
  misc_feature (844)..(844): n is a, c, g, or t
  misc_feature (858)..(858): n is a, c, g, or t
  misc_feature (866)..(866): n is a, c, g, or t
  misc_feature (882)..(882): n is a, c, g, or t
  misc_feature (895)..(895): n is a, c, g, or t
  misc_feature (901)..(901): n is a, c, g, or t
  misc_feature (910)..(910): n is a, c, g, or t
  misc_feature (913)..(913): n is a, c, g, or t
  misc_feature (918)..(918): n is a, c, g, or t
  misc_feature (930)..(930): n is a, c, g, or t
  misc_feature (938)..(938): n is a, c, g, or t
  misc_feature (940)..(940): n is a, c, g, or t
  misc_feature (948)..(948): n is a, c, g, or t
  misc_feature (957)..(957): n is a, c, g, or t
  misc_feature (970)..(970): n is a, c, g, or t
  misc_feature (972)..(973): n is a, c, g, or t
  misc_feature (989)..(989): n is a, c, g, or t
  misc_feature (996)..(996): n is a, c, g, or t
  misc_feature (1022)..(1022): n is a, c, g, or t
  misc_feature (1025)..(1025): n is a, c, g, or t
  misc_feature (1032)..(1032): n is a, c, g, or t
  misc_feature (1042)..(1044): n is a, c, g, or t
  misc_feature (1052)..(1053): n is a, c, g, or t
  misc_feature (1059)..(1059): n is a, c, g, or t
  misc_feature (1061)..(1061): n is a, c, g, or t
  misc_feature (1063)..(1063): n is a, c, g, or t
  misc_feature (1065)..(1065): n is a, c, g, or t
  misc_feature (1067)..(1071): n is a, c, g, or t
gggttttgctctagtgtttgggtttcttcgcggctgctcaagatgaaccgactcttcgggaaagcgaaacccaaggctccgccgcccagcctgactgactgcattggcacggtggacagtagagcagaatccattgacaagaagatttctcgattggatgctgagctagtgaagtataaggatcagatcaagaagatgagagagggtcctgcaaagaatatggtcaagcagaaagccttgcgagttttaaagcaaaagaggatgtatgagcagcagcgggacaatcttgcccaacagtcattcaacatggaacaagccaattataccatccagtctttgaaggacaccaagaccacggttgatgctatgaaactgggagtaaaggaaatgaagaaggcatacaagcaagtgaagatcgaccagattgaggatttacaagaccagctagaggatatgatggaagatgcaaatgaaatccaagaagcactgagtcgcagttatggcaccccagaactggatgaagatgatttagaagcagagttggatgcactaggtgatgagcttctggctgatgaagacagttcttatttggatgaggcagcatctgcacctgcaattccagaaggtgttcccactgatacaaaaaacaaggatggagttctggtggatgaatttggattgccacagatccctgcttcatagatttgcatcattcaagcatatcttgtaaaacaaaccncatattatggggactaggaaatatttatctttccaaatttgccataacagnatttangttttcctttcntttctttgaaaggaaagtttaattaaccttggctcnttttattttttccnataaaaanactcattggctttggnaaaatgcctttcntcccancaaaaattngantcccntttttttctttnggaaaaancnacctccgntttaaaaanaattttttaaacncnnaagaacttgtttttcnttccatnaaaaaaaaatttggaaaaaaaaactnaangggaatnggaacctttnnncaaaaaannaaaaananananannnnn

SEQ ID NO: 531 - DNA, 990 bp, Homo sapiens
  misc_feature (735)..(735): n is a, c, g, or t
  misc_feature (750)..(750): n is a, c, g, or t
  misc_feature (782)..(782): n is a, c, g, or t
  misc_feature (786)..(786): n is a, c, g, or t
  misc_feature (792)..(792): n is a, c, g, or t
  misc_feature (811)..(811): n is a, c, g, or t
  misc_feature (824)..(824): n is a, c, g, or t
  misc_feature (856)..(856): n is a, c, g, or t
  misc_feature (861)..(861): n is a, c, g, or t
  misc_feature (865)..(865): n is a, c, g, or t
  misc_feature (872)..(872): n is a, c, g, or t
  misc_feature (875)..(875): n is a, c, g, or t
  misc_feature (890)..(890): n is a, c, g, or t
  misc_feature (914)..(914): n is a, c, g, or t
  misc_feature (916)..(916): n is a, c, g, or t
  misc_feature (919)..(919): n is a, c, g, or t
  misc_feature (924)..(924): n is a, c, g, or t
  misc_feature (928)..(928): n is a, c, g, or t
  misc_feature (940)..(940): n is a, c, g, or t
  misc_feature (947)..(947): n is a, c, g, or t
  misc_feature (952)..(952): n is a, c, g, or t
  misc_feature (954)..(956): n is a, c, g, or t
  misc_feature (974)..(974): n is a, c, g, or t
  misc_feature (979)..(979): n is a, c, g, or t
  misc_feature (987)..(987): n is a, c, g, or t
  misc_feature (989)..(989): n is a, c, g, or t
gcgcggctcggcgctcccggcctggcgttgtggcgccgcagcccttgccaccttccctgcacctgccctgcccggcctcatgtaccgcgcgctgtacgcgttccgctcggcggagcccaacgcgctggcgttcgccgcgggcgagaccttcctggtgctagagcgaagcagcgcgcactggtggctggccgcgcgggcgcgcagtggtgagacgggctacgtgccgccagcctacctgcgccgcctgcagggcctggagcaggatgtcctccaggccattgaccgggccatcgaggctgtacacaacacagccatgcgggatggtggcaagtacagcctggaacagcgtggagtcctccagaagctgatccaccaccggaaagagaccctgtcacgcagaggcccttcagcctccagtgttgcagttatgacctcatcaaccagtgaccaccacttggatgctgctgcagccaggcagcccaatggggtgtgtcgagctgggttcgagcggcagcacagcctacccagttctgagcatcttggggcagatggaggcctctaccagatcccacttccatcttcccagatcccaccacagcctcgccgagcagcacccaccacaccgcccccaccagtgaagcgccgagaccgcgaggccctgatggcctctgggagtggtggccacaacaccatgccctccgggggtaactctgtgtccagcggctcctcagtcancacacctccctgganacgctctataccagctccagcccatctgaacnaggntccagntgctcacccaaacccccanctgtgccccgccnaggcacccacaccaccgtgtcccaagtccagnccccntccntcaaggnatnaacaactgaaccccntgaaaaaaaaaaatggcaactggnanaanctcancctnttgataacctgnaaacccntgggnannntgaaccctggggaaccanaaaanaaaaaggnanc

SEQ ID NO: 532 - DNA, 632 bp, Homo sapiens
  misc_feature (602)..(602): n is a, c, g, or t
  misc_feature (604)..(605): n is a, c, g, or t
  misc_feature (609)..(609): n is a, c, g, or t
  misc_feature (613)..(613): n is a, c, g, or t
  misc_feature (615)..(615): n is a, c, g, or t
  misc_feature (617)..(617): n is a, c, g, or t
  misc_feature (620)..(623): n is a, c, g, or t
  misc_feature (629)..(629): n is a, c, g, or t
  misc_feature (632)..(632): n is a, c, g, or t
ggggagtcgggccgcgactgtggtcgtttttataccttcccgcgcggacgccggcgctgccaacggaagggcggagacggagtttcgtcatgttggccaggcccatttgagatctttgaagatatcctcaacgtgaggctctgctgccatgaaggtgaagattaagtgctggaacggcgtggccacttggctctgggtggccaacgatgagaactgtggcatctgcaggatggcatttaacggatgctgccctgactgcaaggtgcccggcgacgactgcccgctggtgtggggccagtgctcccactgcttccacatgcattgcatcctcaagtggctgcacgcacagcaggtgcagcagcactgccccatgtgccgccaggaatggaagttcaaggagtgaggcccgacctggctctcgctggaggggcatcctgagactccttcctcatgctggcgccgatggctgctggggacagcgcccctgagctgcaacaaggtggaaacaagggctggagctgcgtttgttttgccatcactatgttgacacttttatccaataagtgaaaactcattaaactactcaaatcttaaaaaaaaanannaaanaaanananaannnnaaaaanaan

SEQ ID NO: 533 - DNA, 1088 bp, Homo sapiens
  misc_feature (813)..(813): n is a, c, g, or t
  misc_feature (824)..(824): n is a, c, g, or t
  misc_feature (836)..(836): n is a, c, g, or t
  misc_feature (865)..(865): n is a, c, g, or t
  misc_feature (883)..(883): n is a, c, g, or t
  misc_feature (904)..(904): n is a, c, g, or t
  misc_feature (914)..(914): n is a, c, g, or t
  misc_feature (922)..(922): n is a, c, g, or t
  misc_feature (924)..(924): n is a, c, g, or t
  misc_feature (935)..(936): n is a, c, g, or t
  misc_feature (964)..(964): n is a, c, g, or t
  misc_feature (972)..(972): n is a, c, g, or t
  misc_feature (974)..(974): n is a, c, g, or t
  misc_feature (992)..(992): n is a, c, g, or t
  misc_feature (995)..(995): n is a, c, g, or t
  misc_feature (1008)..(1008): n is a, c, g, or t
  misc_feature (1014)..(1014): n is a, c, g, or t
  misc_feature (1041)..(1041): n is a, c, g, or t
  misc_feature (1043)..(1043): n is a, c, g, or t
  misc_feature (1051)..(1051): n is a, c, g, or t
  misc_feature (1057)..(1058): n is a, c, g, or t
  misc_feature (1061)..(1061): n is a, c, g, or t
  misc_feature (1067)..(1067): n is a, c, g, or t
  misc_feature (1069)..(1069): n is a, c, g, or t
  misc_feature (1086)..(1087): n is a, c, g, or t
ggcgagaagggaaccaagccgccttcagttgaggatggcttccagaccgtccctctcatcactcccttggaggttaatcacttacagctgcctgctccagaaaaggtgattgtgaagacaagaacggaatatcagccggaacagaagaacaaagggaagttccgggtgccgaaaatcgctgaatttacggtcaccatccttgtcagcctggccctagctttccttgcgtgcatcgtgttcctggtggtttacaaagccttcacctatgatcacagctgcccagagggattcgtctataagcacaaacgctgtatcccagcctccctggatgcttactactcctcccaggaccccaattccagaagccgcttctacacagtcatcagccactacagcgtggccaagcagagcactgcccgggccatcgggccgtggctgtcagcagccgctgtcatccatgagcccaagccgcccaagacccagggccactagaggcctgccccagccagaatggggggcggggtggagaggaggacccccattggctaagccaagctccagttacaagacaacactgtactcctgggatatgggggcgggggcggggcagggcagggtggggggaagaacgcaccaaaaacgtggtgtgtgctggagttgtctgaaccgatatttctttttgttccttggtattgttgattcgtcgccgagtcaggctcatgtacaaaggcatgtttcgtgttgattgttcccatgtaagatatttttaaagccactgcttattctttgttaggaaaatgtaacagcagaaanggaaagaaacnaagaacatgacnaaaagcattaactggctccatcaaaaacnttgaagggcagtgaaaancacaaactctgtgggcttctnaaataaaaancgtaactncngtgggggctcnnggttgcaaaatatgatgaccaaaccggnatattccntnacctggggtctgcagggnagnccccagaaatgangaatgnccaactggaaaaaaaactaatttggcntnttaacccnaaagcnntancccaangnaagggggggccttgggnnt

SEQ ID NO: 534 - DNA, 1042 bp, Homo sapiens
  misc_feature (812)..(812): n is a, c, g, or t
  misc_feature (833)..(833): n is a, c, g, or t
  misc_feature (854)..(854): n is a, c, g, or t
  misc_feature (862)..(862): n is a, c, g, or t
  misc_feature (868)..(868): n is a, c, g, or t
  misc_feature (870)..(870): n is a, c, g, or t
  misc_feature (873)..(873): n is a, c, g, or t
  misc_feature (888)..(888): n is a, c, g, or t
  misc_feature (896)..(896): n is a, c, g, or t
  misc_feature (915)..(915): n is a, c, g, or t
  misc_feature (919)..(919): n is a, c, g, or t
  misc_feature (924)..(924): n is a, c, g, or t
  misc_feature (935)..(936): n is a, c, g, or t
  misc_feature (947)..(947): n is a, c, g, or t
  misc_feature (950)..(950): n is a, c, g, or t
  misc_feature (953)..(953): n is a, c, g, or t
  misc_feature (957)..(957): n is a, c, g, or t
  misc_feature (962)..(962): n is a, c, g, or t
  misc_feature (976)..(976): n is a, c, g, or t
  misc_feature (994)..(994): n is a, c, g, or t
  misc_feature (1007)..(1007): n is a, c, g, or t
  misc_feature (1011)..(1012): n is a, c, g, or t
  misc_feature (1020)..(1020): n is a, c, g, or t
  misc_feature (1022)..(1022): n is a, c, g, or t
  misc_feature (1025)..(1025): n is a, c, g, or t
  misc_feature (1034)..(1034): n is a, c, g, or t
  misc_feature (1039)..(1039): n is a, c, g, or t
  misc_feature (1041)..(1042): n is a, c, g, or t
ggtctggacaaccgcgactccttcgaggaggtgcagcggctcaggcagcagatcctcgacaccaagtcttgcctcaagaacaaaaccaaggagaacgtggacgtgcccctggtcatctgcggcaacaagggtgaccgcgacttctaccgcgaggtggaccagcgcgagatcgagcagctggtgggcgacgacccccagcgctgcgcctacttcgagatctcggccaagaagaacagcagcctggaccagatgttccgcgcgctcttcgccatggccaagctgcccagcgagatgagcccagacctgcaccgcaaggtctcggtgcagtactgcgacgtgctgcacaagaaggcgctgcggaacaagaagctgctgcgggccggcagcggcggcggcggcggcgacccgggcgacgcctttggcatcgtggcacccttcgcgcgccggcccagcgtacacagcgacctcatgtacatccgcgagaaggccagcgccggcagccaggccaaggacaaggagcgctgcgtcatcagctaggagccccgccgcgctggcgacacaacctaaggaggacctttttgttaagtcaaatccaacggcccggtgcgccccaggccgggagcgcgcgcggactggcgtctcccctcccggcgatccgcccccagcactggggaggcgccactgaaccgagaagggacggtcatctgctccggaaggaaagagaacgggccaagactgggactattccccacccccggtcccccattgaggcccgccacccccataactttgggagcgagggcccagccganggtggatttatcttctcaaanacctaaaaatgaaccccgggntggggganggaatntnaanttttccagcctctgntaggcttnaaaaaaaccgtcatgcccncttnaaggntcaggaacccnnggggcattatnttngtntgtnattcngggtttgctgtganaacccggtaaaacctctngccctcccaaaantaanngggggggngnggntcaaatcanaaccnann

SEQ ID NO: 535 - DNA, 1159 bp, Homo sapiens
  misc_feature (771)..(771): n is a, c, g, or t
  misc_feature (776)..(776): n is a, c, g, or t
  misc_feature (799)..(799): n is a, c, g, or t
  misc_feature (903)..(903): n is a, c, g, or t
  misc_feature (906)..(906): n is a, c, g, or t
  misc_feature (915)..(915): n is a, c, g, or t
  misc_feature (917)..(917): n is a, c, g, or t
  misc_feature (922)..(922): n is a, c, g, or t
  misc_feature (929)..(929): n is a, c, g, or t
  misc_feature (938)..(938): n is a, c, g, or t
  misc_feature (959)..(959): n is a, c, g, or t
  misc_feature (982)..(982): n is a, c, g, or t
  misc_feature (989)..(989): n is a, c, g, or t
  misc_feature (999)..(999): n is a, c, g, or t
  misc_feature (1007)..(1007): n is a, c, g, or t
  misc_feature (1022)..(1022): n is a, c, g, or t
  misc_feature (1051)..(1051): n is a, c, g, or t
  misc_feature (1081)..(1081): n is a, c, g, or t
  misc_feature (1097)..(1098): n is a, c, g, or t
  misc_feature (1103)..(1103): n is a, c, g, or t
  misc_feature (1107)..(1107): n is a, c, g, or t
  misc_feature (1109)..(1109): n is a, c, g, or t
  misc_feature (1123)..(1124): n is a, c, g, or t
  misc_feature (1127)..(1127): n is a, c, g, or t
  misc_feature (1139)..(1139): n is a, c, g, or t
  misc_feature (1145)..(1145): n is a, c, g, or t
  misc_feature (1156)..(1156): n is a, c, g, or t
gccaagatggcggtgtgcatcgcggtgattgccaaggagaattaccccctctacattcgcagcacccctacggagaacgagctgaagttccactacatggtgcacacatctctggacgtggtggatgagaagatctccgcaatggggaaggccctggtcgaccagagggagctgtacctgggcctgctctaccccacggaggactacaagttaactttccgggccaggcattgattcatgaagagggtgaggtgttccagacagacagactcggagtctaggtggttcggctcctggagtgtgaactgggtaaggcttggctgcctgctcttcgcttctcctgcaaacaccagacgtcgccctagcaaagtatttaggcttgtacccagcacggccactgcaggaccagcccagcatgggcatttcctgtgattcaaggttgccacatttctccaaagtgagggcccacagagggccctccaccggcagtccctgtgttacgagtgccttccctaaccagctgtgcagatacggctacgtcaccaactccaaggtgaagtttgtcatggtggtagattcctccaacacagcccttcgagacaacgaaattcgcagcatgttccggaagctacacaactcctacacagacgtgatgtgcaaccccttctacaacccgggggaccgcatccagtccagcagggcctttgataacatggtgacgtcgatgatgatacaggtgtgctgagtgagctgtgctgccagccatcgcanaagancccgcgcacgactgtggtggggnccgtcggtctgttctggttgcctcttcctgaatgggaacgcctggggctttcagggcaggcagctgtgcatgttctctcaactaaaggtcttgtgaaaagaaanttnggctttttncntccgngtcaccnaggatttanttaaaaaaaaattcactaagnacttttctggggggggggcaaangtttggnatcaaatggnccaggtancctgtcctcattttnccaaaggggcaaaagcaaggggtgcctgnaaaccaaaaattcctgaacctgcaggaacntggaacatgtgggtcnnccccntggntnaaaaggggggctgnnctnggaagggggggncccctngaaccccaaanccc

SEQ ID NO: 536 - DNA, 917 bp, Homo sapiens
ggtcggcttgtcaggtggtggaggaaaaggcgctccgtcatggggatccagacgagccccgtcctgctggcctccctgggggtggggctggtcactctgctcggcctggctgtgggctcctacttggttcggaggtcccgccggcctcaggtcactctcctggaccccaatgaaaagtacctgctacgactgctagacaagacgactgtgagccacaacaccaagaggttccgctttgccctgcccaccgcccaccacactctggggctgcctgtgggcaaacatatctacctctccacccgaattgatggcagcctggtcatcaggccatacactcctgtcaccagtgatgaggatcaaggctatgtggatcttgtcatcaaggtctacctgaagggtgtgcaccccaaatttcctgagggagggaagatgtctcagtacctggatagcctgaaggttggggatgtggtggagtttcgggggccaagcgggttgctcacttacactggaaaagggcattttaacattcagcccaacaagaaatctccaccagaaccccgagtggcgaagaaactgggaatgattgccggcgggacaggaatcaccccaatgctacagctgatccgggccatcctgaaagtccctgaagatccaacccagtgctttctgctttttgccaaccagacagaaaaggatatcatcttgcgggaggacttagaggaactgcaggcccgctatcccaatcgctttaagctctggttcactctggatcatcccccaaaagattgggcctacagcaagggctttgtgactgccgacatgatccgggaacacctgcccgctccaggggatgatgtgctggtactgctttgtgggccacccccaatggtgcagctggcctgccatcccaacttgga

SEQ ID NO: 537 - DNA, 857 bp, Homo sapiens
gggaaagcctttttttggcccagtttattacgtatgcatgaaagaactcacactggagagaaaccatatgaatgtaagcagtgttctaaagccttccctgtttacagttcctatctaagacatgaaaaaatacacactggggagaaaccgtatgaatgtaagcagtgttctaaagccttccctgattacagttcatatctaagacatgaaagaactcacactggagagaaaccctacaaatgtaaacaatgtgggaaagccttcagtgtttccggttcccttcgagtacatgaaagaattcacactggagagaaaccctatacatgtaaacagtgtgggaaagcgttttgtcatcttggaagctttcaaagacacatgataatgcacagtggagatggacctcataaatgtaagatatgtgggaaaggctttgattttcctggttcagcacgaattcatgaaggaactcacactctagagaaaccctatgaatgcaagcaatgtgggaaagccttccgtacttccagttcccttcgaaaacatgaaacaacacacactggagagcaaccctataaatgtaaatgtggaaaagcttttagtgatttattttcctttcaaagtcatgaaacaacacacagtgaagaggagccttatgaatgtaaggagtgtgggaagcatttagttcttttaaatacttttgtcgccatgaaaggactcacagtgaagaaaaatcttatgagtgtcaaatttgtggcaaagccttcagtcgtttcagttacttaaaaactcatgaaaggactcacacggcagagaagccatatgaatgtaagcaatgcaggaaagcattcttttggccc

SEQ ID NO: 538 - DNA, 1204 bp, Homo sapiens
  misc_feature (830)..(830): n is a, c, g, or t
  misc_feature (869)..(869): n is a, c, g, or t
  misc_feature (894)..(895): n is a, c, g, or t
  misc_feature (905)..(905): n is a, c, g, or t
  misc_feature (908)..(908): n is a, c, g, or t
  misc_feature (911)..(912): n is a, c, g, or t
  misc_feature (926)..(926): n is a, c, g, or t
  misc_feature (947)..(947): n is a, c, g, or t
  misc_feature (964)..(964): n is a, c, g, or t
  misc_feature (987)..(987): n is a, c, g, or t
  misc_feature (999)..(999): n is a, c, g, or t
  misc_feature (1012)..(1013): n is a, c, g, or t
  misc_feature (1020)..(1020): n is a, c, g, or t
  misc_feature (1027)..(1028): n is a, c, g, or t
  misc_feature (1041)..(1042): n is a, c, g, or t
  misc_feature (1056)..(1056): n is a, c, g, or t
  misc_feature (1065)..(1065): n is a, c, g, or t
  misc_feature (1079)..(1079): n is a, c, g, or t
  misc_feature (1083)..(1083): n is a, c, g, or t
  misc_feature (1093)..(1094): n is a, c, g, or t
  misc_feature (1103)..(1103): n is a, c, g, or t
  misc_feature (1111)..(1112): n is a, c, g, or t
  misc_feature (1117)..(1117): n is a, c, g, or t
  misc_feature (1121)..(1121): n is a, c, g, or t
  misc_feature (1125)..(1125): n is a, c, g, or t
  misc_feature (1137)..(1137): n is a, c, g, or t
  misc_feature (1141)..(1141): n is a, c, g, or t
  misc_feature (1148)..(1148): n is a, c, g, or t
  misc_feature (1150)..(1150): n is a, c, g, or t
  misc_feature (1172)..(1172): n is a, c, g, or t
  misc_feature (1175)..(1175): n is a, c, g, or t
  misc_feature (1183)..(1184): n is a, c, g, or t
  misc_feature (1186)..(1186): n is a, c, g, or t
  misc_feature (1203)..(1203): n is a, c, g, or t
ggactagttctagatcgcgagcggccgccgccgccgccgcccgccccgcagcccaccatgtctcgccgcaagcaaggcaaaccccagcacttaagcaaacgggaattctcgcccgagcctcttgaagccattcttacagatgatgaaccagaccacggcccgttgggagctccagaaggggatcatgacctcctcacctgtgggcagtgccagatgaacttcccattgggggacattcttatttttatcgagcacaaacggaaacaatgcaatggcagcctctgcttagaaaaagctgtggataagccaccttccccttcaccaatcgagatgaaaaaagcatccaatcccgtggagtttggcatccaggtcacgccagaggatgacgattgtttatcaacgtcatctagaggaatttgccccaaacaggaacacatagcagataaacttctgcactggaggggcctctcctcccctcgttctgcacatggagctctaatccccacgcctgggatgagtgcagaatatgccccgcagggtatttgtaaagatgagcccagcagctacacatgtacaacttgcaaacagccattcaccagtgcatggtttctcttgcaacacgcacagaacactcatggattaagaatctacttagaaagcgaacacggaagtcccctgaccccgcgggttcttcacacacccccattcggcgtagtacccagagagctcaagatgtgtggcagttttcggatggaagctcgagagcccttaagttctgagaaaattttgaagcccccaaggggtggggtggacgcgtggccgcccagtcnacgtcagcgtgggtctgtcatcctgctagtttgtgatgnttttctgacagtagccttccaaaannccgttgtgcnaanaannaattcttgcaaaantccttccagcctaaggcctgncagcccccttttttttntttttttttattaaaagttaaancaaaaaaccgancccctttggaaanntggaatnagtcccnntaaaaaagggccnnggaacatcccttcnagaaagaancccttgcccttttnaacnaccaacctannttccttttnggggaaannccctnaatncccnccccttgttttnaaantttattntntttttaaaagggggcttaaatnccnaaaaattnngnatttaaaaaaaaaaaana

SEQ ID NO: 539 - DNA, 1084 bp, Homo sapiens
  misc_feature (702)..(702): n is a, c, g, or t
  misc_feature (705)..(705): n is a, c, g, or t
  misc_feature (720)..(720): n is a, c, g, or t
  misc_feature (752)..(752): n is a, c, g, or t
  misc_feature (765)..(765): n is a, c, g, or t
  misc_feature (785)..(785): n is a, c, g, or t
  misc_feature (801)..(801): n is a, c, g, or t
  misc_feature (818)..(818): n is a, c, g, or t
  misc_feature (833)..(833): n is a, c, g, or t
  misc_feature (853)..(853): n is a, c, g, or t
  misc_feature (868)..(868): n is a, c, g, or t
  misc_feature (887)..(887): n is a, c, g, or t
  misc_feature (891)..(891): n is a, c, g, or t
  misc_feature (899)..(899): n is a, c, g, or t
  misc_feature (906)..(906): n is a, c, g, or t
  misc_feature (922)..(922): n is a, c, g, or t
  misc_feature (931)..(931): n is a, c, g, or t
  misc_feature (936)..(936): n is a, c, g, or t
  misc_feature (949)..(949): n is a, c, g, or t
  misc_feature (953)..(954): n is a, c, g, or t
  misc_feature (964)..(964): n is a, c, g, or t
  misc_feature (968)..(968): n is a, c, g, or t
  misc_feature (971)..(971): n is a, c, g, or t
  misc_feature (992)..(992): n is a, c, g, or t
  misc_feature (994)..(994): n is a, c, g, or t
  misc_feature (1000)..(1000): n is a, c, g, or t
  misc_feature (1018)..(1019): n is a, c, g, or t
  misc_feature (1054)..(1054): n is a, c, g, or t
  misc_feature (1056)..(1056): n is a, c, g, or t
  misc_feature (1061)..(1061): n is a, c, g, or t
  misc_feature (1066)..(1067): n is a, c, g, or t
  misc_feature (1069)..(1069): n is a, c, g, or t
  misc_feature (1077)..(1078): n is a, c, g, or t
  misc_feature (1083)..(1083): n is a, c, g, or t
gcccacgcgtccgtgcagctgatccctcagcagctgctgaccaccctgggccccctgttccggaactcccagttggcacagttccacttcaccaacagagactgcgactcgctcaaggggctctgccgcatcatgggcaacggcttcgcgggctgcatgctgttcccccacatctccccctgtgaggtgcgcgtgctcatgctcctgtactcgtccaagaagaagatcttcatgggcctcatcccctacgaccagagcggcttcgtcagtgccatccggcaggtcatcaccacccgcaagcaggcagtgggacctggtggtgtcaactcaggcccagtccagatcgtcaacaacaagtttctggcatggagtggtgtcatggagtggcaggagcccaggcctgagcccaacagtcggttcaagaggtggctgccatcccacgtctacgtgaaccagggggagatcctgaggaccgagcagtggccaaggaagctgtacatgcagctcatcccgcagcagctgctgaccaccctagtgccgctgttccggaactcgcgcctggtccagttccacttcaccaaggacctggagacactgaagagcctgtgccggatcatggacaatggcttcgccggctgcgtgcacttttcctacaaagcatcgtgtgagatccgcgtgcttatgctcctgtactcttcaganaanaaaatcttcattggncctcatcccccatgaccagggcaacttttgtnaacggcatccggnggtgtcatttgccaaccagnagcaaggccttgcagncggaaacctggaagcangaagcaaacagccancgaagggatggggggggtanttggttaccccgggntgggccccttccaaggaantcanaaaatgangcccccngcaaaaaatggggganacctttttnaacangggcccctggggnattnnaatgcccaanaaantgnaagagggtgtcctgaagcctncnaagganggtccccaccccctctanntttcccaaaaaagccttttaaaaacctggaaaaananaaaanaaaannantaaaaaannaaaana

SEQ ID NO: 540 - DNA, 1013 bp, Homo sapiens
  misc_feature (731)..(731): n is a, c, g, or t
  misc_feature (767)..(767): n is a, c, g, or t
  misc_feature (804)..(804): n is a, c, g, or t
  misc_feature (845)..(845): n is a, c, g, or t
  misc_feature (852)..(852): n is a, c, g, or t
  misc_feature (866)..(866): n is a, c, g, or t
  misc_feature (873)..(873): n is a, c, g, or t
  misc_feature (875)..(875): n is a, c, g, or t
  misc_feature (881)..(881): n is a, c, g, or t
  misc_feature (893)..(894): n is a, c, g, or t
  misc_feature (897)..(897): n is a, c, g, or t
  misc_feature (907)..(908): n is a, c, g, or t
  misc_feature (912)..(912): n is a, c, g, or t
  misc_feature (915)..(915): n is a, c, g, or t
  misc_feature (921)..(921): n is a, c, g, or t
  misc_feature (924)..(924): n is a, c, g, or t
  misc_feature (935)..(935): n is a, c, g, or t
  misc_feature (940)..(940): n is a, c, g, or t
  misc_feature (953)..(953): n is a, c, g, or t
  misc_feature (962)..(962): n is a, c, g, or t
  misc_feature (965)..(965): n is a, c, g, or t
  misc_feature (969)..(969): n is a, c, g, or t
  misc_feature (972)..(972): n is a, c, g, or t
  misc_feature (976)..(976): n is a, c, g, or t
  misc_feature (990)..(990): n is a, c, g, or t
  misc_feature (995)..(995): n is a, c, g, or t
  misc_feature (999)..(1000): n is a, c, g, or t
  misc_feature (1003)..(1003): n is a, c, g, or t
gggcgggaaagcagctcaagcctcacccaccgccctgcccccagccccgccactcccaggctcctcgggactcggcgggtcctcctgggagtctcggaggggaccggctgtgcagacgccatggagttggtgctggtcttcctctgcagcctgctggcccccatggtcctggccagtgcagctgaaaaggagaaggaaatggacccttttcattatgattaccagaccctgaggattgggggactggtgttcgctgtggtcctcttctcggttgggatcctccttatcctaagtcgcaggtgcaagtgcagtttcaatcagaagccccgggccccaggagatgaggaagcccaggtggagaacctcatcaccgccaatgcaacagagccccagaaagcagagaactgaagtgcagccatcaggtggaagcctctggaacctgaggcggctgcttgaacctttggatgcaaatgtcgatgcttaagaaaaccggccacttcagcaacagccctttccccaggagaagccaagaacttgtgtgtcccccaccctatcccctctaacaccattcctccacctgatgatgcaactaacacttgcctccccactgcagcctgcggtcctgcccacctcccgtgatgtgtgtgtgtgtgtgtgtgtgtgtgactgtgtgtgtttgctaactgtggtctttgtggctacttgtttgtggatggtattgtgtttgttantgaactgtggactcgctttcccaggcaggggctganccacatggccatctgctcctccctgcccccgtggccntccatcaacttctgctcctaagaaggctgcttgtttgcccnaaaccanccccctcccctgantttaggnangcttanggtaaaaaacannggncatggttttnnattnttnttgggnacntggaaggtttncacantttttcatcattnttcaaggantcntttnctncttnaaaaaaaaccttgntttcntttnnccncctaatccca

SEQ ID NO: 541 - DNA, 1072 bp, Homo sapiens
  misc_feature (217)..(217): n is a, c, g, or t
  misc_feature (697)..(697): n is a, c, g, or t
  misc_feature (706)..(706): n is a, c, g, or t
  misc_feature (740)..(740): n is a, c, g, or t
  misc_feature (755)..(755): n is a, c, g, or t
  misc_feature (771)..(771): n is a, c, g, or t
  misc_feature (785)..(785): n is a, c, g, or t
  misc_feature (817)..(817): n is a, c, g, or t
  misc_feature (824)..(824): n is a, c, g, or t
  misc_feature (829)..(829): n is a, c, g, or t
  misc_feature (835)..(835): n is a, c, g, or t
  misc_feature (837)..(837): n is a, c, g, or t
  misc_feature (858)..(859): n is a, c, g, or t
  misc_feature (877)..(877): n is a, c, g, or t
  misc_feature (889)..(889): n is a, c, g, or t
  misc_feature (902)..(902): n is a, c, g, or t
  misc_feature (905)..(905): n is a, c, g, or t
  misc_feature (915)..(916): n is a, c, g, or t
  misc_feature (929)..(929): n is a, c, g, or t
  misc_feature (931)..(932): n is a, c, g, or t
  misc_feature (936)..(936): n is a, c, g, or t
  misc_feature (958)..(958): n is a, c, g, or t
  misc_feature (960)..(961): n is a, c, g, or t
  misc_feature (972)..(972): n is a, c, g, or t
  misc_feature (974)..(974): n is a, c, g, or t
  misc_feature (978)..(978): n is a, c, g, or t
  misc_feature (980)..(980): n is a, c, g, or t
  misc_feature (984)..(984): n is a, c, g, or t
  misc_feature (992)..(992): n is a, c, g, or t
  misc_feature (998)..(998): n is a, c, g, or t
  misc_feature (1001)..(1001): n is a, c, g, or t
  misc_feature (1006)..(1006): n is a, c, g, or t
  misc_feature (1011)..(1011): n is a, c, g, or t
  misc_feature (1013)..(1013): n is a, c, g, or t
  misc_feature (1021)..(1021): n is a, c, g, or t
  misc_feature (1032)..(1032): n is a, c, g, or t
  misc_feature (1037)..(1037): n is a, c, g, or t
  misc_feature (1046)..(1048): n is a, c, g, or t
gctttgccatcccctcgagaagtgactgttacagaacggctcctcctggatggcccaccacctcattcaccagagactcctcaatttccccccacaactggagctgtactgtacactgttaagagaaaccaggttgggcctgaggttcgctcctgccccaaggcatcccccagacttcagaaagagagggagggccaaaaggcagtgagtgagtcanaggctttgatgctggtctgggatgcatcagaaactgagaaattgcctggtaccgtggaaccccctgcttccttcctgagtcctgtttcctcaaagaccagagatgcagggagaagacatgtgtccgggaaaccagacactcaagagagatggctgccctcaagcagagctcgggtgaagacaagagacaggacgtgccctgtccatgaatctccatcaggaattgacacctcagagacttctcccaaagcccctagagggggtttggctaaagacagtggaacacaggccaagggtccagagggggagcagcagccaaaggccgcagaagctacggtgtgtgccaacaacagcaaggtcagctccactggggaaaaggttgtcctgtggacaaggtaggtaagggtggatgacgtgtgtttggaaaaagagcatagaccacatccatgtggctccctagggttaatcatgatacctgggnttacagggnaagctgaccgtgtgatcctcaccatgtgccaagnacaagggggcacagnccacagaaccttcaanatcatcttcccaancagctgggaaaataaaaaccccttgctgaggntttcccnaccgnttttcnanaaactcatgcaactctttccnnactggcctgggaaacccngctctgaagganggaaggatgatgncancccattaccnncaatggcaaaccnanntgtntggaccatgggggacctttttntnntaaaaaaaaancnggantnaaangaaaattnttgggnaantcttnttaancngggaaccnaaaccccaaanggggncccctgggnnnccgggggaaggggggaaattttaa

SEQ ID NO: 542 - DNA, 1029 bp, Homo sapiens
  misc_feature (729)..(729): n is a, c, g, or t
  misc_feature (777)..(777): n is a, c, g, or t
  misc_feature (806)..(806): n is a, c, g, or t
  misc_feature (830)..(830): n is a, c, g, or t
  misc_feature (858)..(858): n is a, c, g, or t
  misc_feature (860)..(860): n is a, c, g, or t
  misc_feature (869)..(869): n is a, c, g, or t
  misc_feature (878)..(879): n is a, c, g, or t
  misc_feature (898)..(898): n is a, c, g, or t
  misc_feature (914)..(914): n is a, c, g, or t
  misc_feature (924)..(925): n is a, c, g, or t
  misc_feature (943)..(943): n is a, c, g, or t
  misc_feature (946)..(947): n is a, c, g, or t
  misc_feature (957)..(957): n is a, c, g, or t
  misc_feature (967)..(967): n is a, c, g, or t
  misc_feature (971)..(972): n is a, c, g, or t
  misc_feature (978)..(978): n is a, c, g, or t
  misc_feature (983)..(983): n is a, c, g, or t
  misc_feature (1000)..(1000): n is a, c, g, or t
  misc_feature (1002)..(1002): n is a, c, g, or t
  misc_feature (1005)..(1006): n is a, c, g, or t
  misc_feature (1009)..(1009): n is a, c, g, or t
  misc_feature (1011)..(1011): n is a, c, g, or t
  misc_feature (1017)..(1019): n is a, c, g, or t
  misc_feature (1022)..(1022): n is a, c, g, or t
  misc_feature (1024)..(1024): n is a, c, g, or t
  misc_feature (1026)..(1026): n is a, c, g, or t
gcccacgcgtccgaagcacagtggggtgacatgtacctgtcggccatctgtgagtaccagttggaagagatccagcgggtgtttgagggcccctataaggagtaccatgaggaagcccagaagtgggaccgctacactgaccctgtacccagccctcggcctggctcgtgcattaacaactggcatcggcgccacggctacaccagctccctggagctacccgacaacatcctcaacttcgtcaagaagcacccgctgatggaggagcaggtggggcctcggtggagccgccccctgctcgtgaagaagggcaccaacttcacccacctggtggccgaccgggttacaggacttgatggagccacctatacagtgctgttcattggcacaggagacggctggctgctcaaggctgtgagcctggggccctgggttcacctgattgaggagctgcagctgtttgaccaggagcccatgagaagcctggtgctatctcagagcaagaagctgctctttgccggctcccgctctcagctggtgcagctgcccgtggccgactgcatgaagtatcgctcctgtgcagactgtgtcctcgcccgggacccctattgcgcctggagcgtcaacaccagccgctgtgtggccgtgggtggccactctggatctctactgatccagcatgtgatgacctcggacacttcaggcatctgcaacctccgtggcagtaanaaagtcaggcccactcccaaaaaacatcacgggtggtggcgggcacanacctggtgctgccctgccacctctcctcnaacttggcccatgcccgctggacntttgggggccgggacctgcctgcggaananccggggtcnttcttctannatgcccggctccaggcccntggttgtgatggctgncccagccccnncatgccgggggcctaccnctnnttttcaaaanaaaaaggggncccnncttggnttctnaaagctaccttttgggntntcnnggnangccccnnngtnancnttg

SEQ ID NO: 543 - DNA, 872 bp, Homo sapiens
gcgcggatggccgcagcggcgatggcggcagcggcaggtggaggggctggcgcggcccgctccctctcgcgcttccgaggctgcctggctggcgcgctgctcggggactgcgtgggctccttctacgaggcccacgacaccgtcgacctgacgtcagtcctgcgtcatgtccagagtctggagccggaccccggcacgcccgggagtgagcggacagaagccttgtactacacagatgacacagccatggccagggccctggtgcagtccctgctagccaaggaggcctttgacgaggtggacatggctcacagatttgctcaggagtacaagaaagaccctgacaggggctatggtgctggagtagtcactgtcttcaagaagctcctgaaccccaaatgtcgcgatgtctttgagcctgcccgggcccagtttaacgggaaaggctcctatggcaatggaggtgccatgcgggtggctggcatctccctggcctatagcagtgtccaggatgtgcagaagtttgcccggctctcggcccagctgacacacgcctcctccctgggttacaatggcgccatcctgcaggccctggctgtgcacctggccttgcagggcgagtcttccagcgagcactttctcaagcaactcctgggccacatggaggatctggagggtgatgcccagtccgtttttggatgccagggagttgggcatggaggagcgtccatactccagccgcctgaagaagattggagagcttctagaccaggcatcggtgaccagggaggaagtggtgtctgagctaggaatgccattgctgcctttgagtcggtacccaccgccatctaactgtttcctacgctgcatgg

SEQ ID NO: 544 - DNA, 988 bp, Homo sapiens
  misc_feature (701)..(701): n is a, c, g, or t
  misc_feature (704)..(704): n is a, c, g, or t
  misc_feature (746)..(746): n is a, c, g, or t
  misc_feature (757)..(757): n is a, c, g, or t
  misc_feature (773)..(773): n is a, c, g, or t
  misc_feature (788)..(788): n is a, c, g, or t
  misc_feature (792)..(792): n is a, c, g, or t
  misc_feature (798)..(798): n is a, c, g, or t
  misc_feature (803)..(803): n is a, c, g, or t
  misc_feature (806)..(806): n is a, c, g, or t
  misc_feature (809)..(809): n is a, c, g, or t
  misc_feature (814)..(814): n is a, c, g, or t
  misc_feature (821)..(822): n is a, c, g, or t
  misc_feature (827)..(827): n is a, c, g, or t
  misc_feature (833)..(833): n is a, c, g, or t
  misc_feature (837)..(837): n is a, c, g, or t
  misc_feature (841)..(841): n is a, c, g, or t
  misc_feature (854)..(854): n is a, c, g, or t
  misc_feature (859)..(859): n is a, c, g, or t
  misc_feature (861)..(861): n is a, c, g, or t
  misc_feature (866)..(866): n is a, c, g, or t
  misc_feature (884)..(884): n is a, c, g, or t
  misc_feature (902)..(902): n is a, c, g, or t
  misc_feature (907)..(907): n is a, c, g, or t
  misc_feature (911)..(911): n is a, c, g, or t
  misc_feature (932)..(932): n is a, c, g, or t
  misc_feature (935)..(935): n is a, c, g, or t
  misc_feature (939)..(939): n is a, c, g, or t
  misc_feature (942)..(942): n is a, c, g, or t
  misc_feature (964)..(965): n is a, c, g, or t
  misc_feature (978)..(978): n is a, c, g, or t
  misc_feature (981)..(981): n is a, c, g, or t
  misc_feature (986)..(986): n is a, c, g, or t
gcgcaccacctcggggaggagccagggcggggcctgaccccacaaagctttagttcccccggggagaggctggggacaagctacccattctggggtatgacacctatcagcacgtgtgagcccgccctgtgcccggcccacttctgcttcctcttagcgcaggaggggtcccgcactgggaggggccctcacagcctaccccgctagctttctgcctgatggtgagcttgccccgttgttcgccgccatctttcgcctttgcctgacagctcaggtagggcgacgtctccccccagctcagccccaggcagaagtcaggcccgctctgcacctcgtgctgtgcctggcccgtgtgttcccctcacagtgacgcacagccgtcctgtggggagggagggctctgggaaaagacccccttcttgagtgttccccatcggtttgtccccagggctgcgctggcctcggcacaccagtgccacccgctgccccggacgctgagcgtcctgaagagcacgccgcaggtacggggcatgcacaccatcatcagggacaaggagaccagtcgcgacgagttcatcttctactccaagagactgatgcggctgctcatcgagcacgcgctctccttcctgccctttcaggactgcgtcgtacagaccccgcaggggcaggactatgcgggcaagtgctatgcggggaancanatcaccggtgtgtccattctgcgcgccggtgaaaccatggancccgcgctgcncgctgtgtgcaaaaangtgcgcatcggcacnatcntcatcnaaacnaancancttancggggannccganctccantacntgangctgcccaagganatcancnatgancacgtgatcctcatggantgcaccgtgtccacgggngcggnggcnatgatggcatgcgcgtgctcntgnacanaantgcctgaagaaaaaattttttnntgtccctgctcanggnaaaangg

SEQ ID NO: 545 - DNA, 1090 bp, Homo sapiens
  misc_feature (803)..(803): n is a, c, g, or t
  misc_feature (827)..(827): n is a, c, g, or t
  misc_feature (830)..(830): n is a, c, g, or t
  misc_feature (873)..(873): n is a, c, g, or t
  misc_feature (883)..(883): n is a, c, g, or t
  misc_feature (888)..(888): n is a, c, g, or t
  misc_feature (894)..(894): n is a, c, g, or t
  misc_feature (901)..(901): n is a, c, g, or t
  misc_feature (925)..(925): n is a, c, g, or t
  misc_feature (933)..(933): n is a, c, g, or t
  misc_feature (936)..(936): n is a, c, g, or t
  misc_feature (939)..(939): n is a, c, g, or t
  misc_feature (963)..(963): n is a, c, g, or t
  misc_feature (972)..(972): n is a, c, g, or t
  misc_feature (993)..(993): n is a, c, g, or t
  misc_feature (996)..(997): n is a, c, g, or t
  misc_feature (1005)..(1005): n is a, c, g, or t
  misc_feature (1032)..(1032): n is a, c, g, or t
  misc_feature (1053)..(1053): n is a, c, g, or t
  misc_feature (1059)..(1060): n is a, c, g, or t
  misc_feature (1063)..(1063): n is a, c, g, or t
  misc_feature (1066)..(1066): n is a, c, g, or t
  misc_feature (1076)..(1076): n is a, c, g, or t
  misc_feature (1085)..(1085): n is a, c, g, or t
  misc_feature (1088)..(1088): n is a, c, g, or t
  misc_feature (1090)..(1090): n is a, c, g, or t
gcccacgcgtccggcacctggcgcccagcgcgcccgtggccgctgccgcctccgccccaggttttgcgtgtgaagctgtgtggaaatgtgaaatactaccagtcacaccattatagtaccgtggtgccacctgatgaaataacagttaattatagacatggccttcccttggtaacacttaccttgccatctagaaaagaacgttgtcaattcgtagtcaaaccaatgttgtcaacagttggttcattccttcaggacctacaaaatgaagataagggtatcaaaactgcagccatcttcacagcagatggcaacatgatttcagcttctaccttgatggatattttgctaatgaatgattttaaacttgtcattaataaaatagcatatgatgtgcagtgtccaaagagagaaaaaccaagtaatgagcacactgctgagatggaacacatgaaatctttggttcacagactatttacaatcttgcatttagaagagtctcagaaaaagagagagcaccatttactggagaaaattgaccacctgaaggaacagctgcagccccttgaacaggtgaaagctggaatagaagctcattcggaagccaaaaccagtggactcctgtgggctggattggcactgctgtccattcagggtggggcactggcctggctcacgtggtgggtgtactcctgggatatcatggagccagttacatacttcatcacatttgcaaattctatggtcttttttgcatactttatagtcactcgacaggattatacttactcagctgttaaaantaggcaatttcttcagttcttccncanaaatcaaagcaacagcactttgatgtgcaccaatacaacaagnttaaaaaaanacctngctaangctaaanaatccctgaaacaggcgcgtcatnctctctgnttngcnaatgcaagtaaaaaaactccatgnaaaaaaatnatcttacagttttaaaggccnccnnaatttccnttaaggattgatttgccaactaaggangtttttgaaccccagggtcantttganngtnaanccttggtaanaattctggnaancn

SEQ ID NO: 546 - DNA, 798 bp, Homo sapiens
  misc_feature (11)..(11): n is a, c, g, or t
  misc_feature (339)..(339): n is a, c, g, or t
  misc_feature (437)..(437): n is a, c, g, or t
  misc_feature (459)..(459): n is a, c, g, or t
  misc_feature (483)..(483): n is a, c, g, or t
  misc_feature (507)..(507): n is a, c, g, or t
  misc_feature (538)..(538): n is a, c, g, or t
  misc_feature (557)..(557): n is a, c, g, or t
  misc_feature (571)..(571): n is a, c, g, or t
  misc_feature (581)..(581): n is a, c, g, or t
  misc_feature (620)..(620): n is a, c, g, or t
  misc_feature (627)..(627): n is a, c, g, or t
  misc_feature (631)..(631): n is a, c, g, or t
  misc_feature (669)..(669): n is a, c, g, or t
  misc_feature (671)..(671): n is a, c, g, or t
  misc_feature (678)..(679): n is a, c, g, or t
  misc_feature (689)..(689): n is a, c, g, or t
  misc_feature (699)..(700): n is a, c, g, or t
  misc_feature (710)..(710): n is a, c, g, or t
  misc_feature (712)..(712): n is a, c, g, or t
  misc_feature (725)..(725): n is a, c, g, or t
  misc_feature (731)..(731): n is a, c, g, or t
  misc_feature (735)..(735): n is a, c, g, or t
  misc_feature (742)..(742): n is a, c, g, or t
  misc_feature (745)..(747): n is a, c, g, or t
  misc_feature (756)..(756): n is a, c, g, or t
  misc_feature (759)..(759): n is a, c, g, or t
  misc_feature (764)..(765): n is a, c, g, or t
  misc_feature (767)..(767): n is a, c, g, or t
gggaaaagcancctccgggcgggcggcggcggaggcggcggcggcggtggcggcggcggcggcgggggggccccagtgtgcggcgccagcggcttgtgcaaaaccaactgtggcgtgtgctgcaaggccgagctgggcctggcgccgtccgcgctgcccgcgggcagggtcatcaagccgcaggtcatcaaccaggctgtggggctgccggccagcggctcgctctactacttcaactacctggactcgaccgcgtacccgccgtctgagctcctcagcggccacctcttcccgtctggcctcctcaatgcgcaggcccccgccgccctggctgctcancccaagctctttctgctggagaacgccaagctggccggcctggctgcggacaagttcccccacccggctccctatccccataaggagcgcttgccggngccgctggagcaagtactgaangaaaactcggccctgactgccgancgcgaaaggcgtcaagggccacancaagctgccaggaggctccgcagatggcaancccaaaaacttcacctgcnaggtgtgcggcaangtgtttaacnctcactataatctcacccaccacatgccggtccacaccngagccanaccnttcgtgtgcaaagtctgccggaaaaagcttttcaccanancaaacanncttctgcaangcaaaaaatnntccacacccnantaaaaaacccacnttaaantgcnaacccanttnnngcaaatctnttnaaacnnancttccaacgtctcaaataacaattatcctaa

SEQ ID NO: 547 - DNA, 1091 bp, Homo sapiens
  misc_feature (788)..(788): n is a, c, g, or t
  misc_feature (791)..(791): n is a, c, g, or t
  misc_feature (849)..(849): n is a, c, g, or t
  misc_feature (865)..(865): n is a, c, g, or t
  misc_feature (947)..(947): n is a, c, g, or t
  misc_feature (958)..(959): n is a, c, g, or t
  misc_feature (963)..(963): n is a, c, g, or t
  misc_feature (967)..(967): n is a, c, g, or t
  misc_feature (972)..(972): n is a, c, g, or t
  misc_feature (974)..(974): n is a, c, g, or t
  misc_feature (977)..(977): n is a, c, g, or t
  misc_feature (990)..(990): n is a, c, g, or t
  misc_feature (992)..(992): n is a, c, g, or t
  misc_feature (994)..(994): n is a, c, g, or t
  misc_feature (1007)..(1007): n is a, c, g, or t
  misc_feature (1012)..(1012): n is a, c, g, or t
  misc_feature (1016)..(1016): n is a, c, g, or t
  misc_feature (1018)..(1018): n is a, c, g, or t
  misc_feature (1021)..(1021): n is a, c, g, or t
  misc_feature (1024)..(1024): n is a, c, g, or t
  misc_feature (1031)..(1031): n is a, c, g, or t
  misc_feature (1033)..(1033): n is a, c, g, or t
  misc_feature (1040)..(1040): n is a, c, g, or t
  misc_feature (1052)..(1052): n is a, c, g, or t
  misc_feature (1062)..(1062): n is a, c, g, or t
  misc_feature (1067)..(1067): n is a, c, g, or t
  misc_feature (1080)..(1080): n is a, c, g, or t
  misc_feature (1088)..(1088): n is a, c, g, or t
gcggctccctgggcgtccctgcgcctggtcgcccccatgtggaatgggcgtatcaggggcatccatcgcctgggtgcggcagtggccccagagggcaatcagaagaagaaaaggacaatactccagttcctgaccaactatttctacgatgtggaggctctgagggattacttgctccaaagggagatgtacaaggtgcatgagaaaaatcggtttcgagacaaggagtggatcaggccagataagtatggccatttctctcaggagttctggaatttctgtgaagtgcctgtcgaagctgtggatgccggtgactgtgacatcaactacgagggcctggataacctccgaacctccgcaggctggacatctcggacctccctgccgtgtccaaccctggcctcactcagatattggtggaggagatgctgcccaattgcgaggttgtgggagtcgactgggctgagggcctgaagtcagggccggaggagcagcctcgggacacagccagccctgtccctgcctagcctttagccctgtccccactcacgtggcttctcagcgggctgcatggaatgtctggtagctcaccacacttctggcttccatttgtcttcactcaacgtcagggtgggggagtggtgctggccaatcacaggagagagcgtgagttcccagtatttattcctggctgcccttggctaaaggtcacagctcctgtcaccctgtcaggcagccctttccatgcccctgttcaggcctggggaggtaaaggctcaggctgttantanccgcaaagagccacactcaccttgtcaggaaactcttctcaaactgtccttatgtgantgcactgccatttctngcagggaccctgactgacacaggggctactactgaactttacagggatggttctccccgtgcagggcccctgtgcccactgnaggaaatgcannatcnttcnccccntnccnttcattaaaggcnangncaccccaggcccnaaaanatgncnggntanggatttntngactttntgttccaattcncctttttcantgggntgtttttttgaangggaaaanctt

SEQ ID NO: 548 - DNA, 1025 bp, Homo sapiens
  misc_feature (708)..(708): n is a, c, g, or t
  misc_feature (836)..(836): n is a, c, g, or t
  misc_feature (889)..(889): n is a, c, g, or t
  misc_feature (914)..(915): n is a, c, g, or t
  misc_feature (920)..(920): n is a, c, g, or t
  misc_feature (930)..(930): n is a, c, g, or t
  misc_feature (946)..(946): n is a, c, g, or t
  misc_feature (969)..(969): n is a, c, g, or t
  misc_feature (972)..(972): n is a, c, g, or t
  misc_feature (983)..(983): n is a, c, g, or t
  misc_feature (988)..(988): n is a, c, g, or t
  misc_feature (993)..(993): n is a, c, g, or t
  misc_feature (995)..(995): n is a, c, g, or t
  misc_feature (999)..(1000): n is a, c, g, or t
  misc_feature (1008)..(1008): n is a, c, g, or t
  misc_feature (1012)..(1012): n is a, c, g, or t
  misc_feature (1018)..(1019): n is a, c, g, or t
  misc_feature (1023)..(1024): n is a, c, g, or t
ggtacggtgctcgtggccgatcacctggcgcgagccctgcgcgctcacggggtgtgcgtgcgcctagtgccagctgtgcgggatccgcacatgctgaccttcctgcagcaactgcgggtggactggcccgctgcctcggagagagcttcctcccacaccctgaggagccacgcccttgaagaacttacctctgctaatgacgggaggacactgtcccctggcatcctaggcagactgtgtctgaaggagctggtggaagaacagggccgcacagctggctatgaccccaacctggacaactgtctggtgactgaggatctcctctctgtgctggctgagctgcaagaggctctatggcattggcccgaggacagccacccaggcctggctggggcctcagatactggtacaggcggctgcctggttgtacatgttgttagctgtgaggaggagttccagcaacagaagttggacctgctttggcagaagttggttgacaaggctccactcagacagaagcacctcatctgtggccctgtgaaagtagctggtgcacctggcactctgatgactgcccctgagtactacgagttccggcatacccaggtgtgcaaggcctcagcactgaagcatggtggggatctggcacaagacccagcctggacagagatctttggtgttctctctgtggccaccatcaagtttganatgctgagcacagccccacagagtcagctcttcctggctctggctgacagcagtatctccacgaagggcacaaagagtggcacctttgtcatgtataattgtgcccgtcttgccacactctttgaaanttacaagtgtatatggaacaaggtctgtaccccacttttcctcctgtgaacantctggacttctcactgctacttgannaaggntgaatggttnttgcctcttcaaaaanaatcctccccttttccgaatctnctnaacccgaaaancaatncttgnantggnnaacccccngggnctccanntttnnt

SEQ ID NO: 549 - DNA, 1013 bp, Homo sapiens
  misc_feature (750)..(750): n is a, c, g, or t
  misc_feature (805)..(805): n is a, c, g, or t
  misc_feature (822)..(822): n is a, c, g, or t
  misc_feature (873)..(873): n is a, c, g, or t
  misc_feature (900)..(900): n is a, c, g, or t
  misc_feature (915)..(915): n is a, c, g, or t
  misc_feature (933)..(933): n is a, c, g, or t
  misc_feature (935)..(935): n is a, c, g, or t
  misc_feature (946)..(946): n is a, c, g, or t
  misc_feature (955)..(955): n is a, c, g, or t
  misc_feature (958)..(958): n is a, c, g, or t
  misc_feature (961)..(961): n is a, c, g, or t
  misc_feature (966)..(967): n is a, c, g, or t
  misc_feature (974)..(974): n is a, c, g, or t
  misc_feature (977)..(977): n is a, c, g, or t
  misc_feature (987)..(987): n is a, c, g, or t
  misc_feature (994)..(995): n is a, c, g, or t
  misc_feature (998)..(999): n is a, c, g, or t
  misc_feature (1006)..(1006): n is a, c, g, or t
  misc_feature (1011)..(1011): n is a, c, g, or t
gggcgggcggggcccgggaggtgctcacactgcagttgggacattttgccggtttcgtgggcgcgcactggtggaaccagcaggatgctgcgctgggccgagcgaccgattccaaggagcccccgggagagctgtgccccgacgtcctgtatcgtacgggccggacgctgcacggccaggagacctacacgccgcgactcatcctcatggatctgaagggtagtttgagctccctaaaagaggaaggtggactctacagggacaaacagttggatgctgcaatagcatggcaggggaagctcaccacacacaaagaggaactctatcccaagaacccttatctccaagactttctgagtgcagagggagtgctgagtagtgatggtgtctggagggtcaaatccattcccaatggcaaaggttcctcaccactccccaccgctacaactccaaaaccacttatccctacagaggccagcatcagggtctggtcagacttcctcagagtccatctccatccccggagcatctgtatgattcagaagtacaaccacgatggggaagcaggtcggctggaggcttttggccaaggggaaagtgtcctaaaggaacccaagtaccaggaagagctggaggacaggctgcatttctacgtggaggaatgtgactacttgcagggcttccagatcctgtgtgacctgcacgatggcttctctggggtaggcgcgaaggcggcaaaactgctacaanatgaatattcagggcggggaataataacctggggcctgctacctggtcccctacnatcgtggggaggcccanagaaacatctatcgtctattaaacacagctttttggtctcgtgcacctgantgctcacagctctcttgtctgcccctngtccttgggtgggancctggggcctgcaaaccnanccacctgtcancttcccttnacntgnattannaatgccnctntgcccttccnctggaanngcnntctgggntaaancc

SEQ ID NO: 550 - DNA, 1093 bp, Homo sapiens
  misc_feature (710)..(710): n is a, c, g, or t
  misc_feature (743)..(743): n is a, c, g, or t
  misc_feature (815)..(815): n is a, c, g, or t
  misc_feature (865)..(865): n is a, c, g, or t
  misc_feature (869)..(869): n is a, c, g, or t
  misc_feature (871)..(871): n is a, c, g, or t
  misc_feature (920)..(920): n is a, c, g, or t
  misc_feature (922)..(922): n is a, c, g, or t
  misc_feature (925)..(926): n is a, c, g, or t
  misc_feature (943)..(943): n is a, c, g, or t
  misc_feature (963)..(963): n is a, c, g, or t
  misc_feature (969)..(969): n is a, c, g, or t
  misc_feature (978)..(978): n is a, c, g, or t
  misc_feature (994)..(994): n is a, c, g, or t
  misc_feature (996)..(996): n is a, c, g, or t
  misc_feature (1008)..(1008): n is a, c, g, or t
  misc_feature (1014)..(1014): n is a, c, g, or t
  misc_feature (1017)..(1017): n is a, c, g, or t
  misc_feature (1021)..(1022): n is a, c, g, or t
  misc_feature (1035)..(1036): n is a, c, g, or t
  misc_feature (1048)..(1048): n is a, c, g, or t
  misc_feature (1060)..(1060): n is a, c, g, or t
  misc_feature (1067)..(1067): n is a, c, g, or t
  misc_feature (1073)..(1073): n is a, c, g, or t
  misc_feature (1076)..(1076): n is a, c, g, or t
  misc_feature (1087)..(1087): n is a, c, g, or t
gcccacgcgtccggcggcggaaatcgcgcggatgccagaacgcgctctcagcttcgggtcctgcggctgcggctgccgccatcatggtgcggaagcttaagttccacgagcagaagctgctgaagcaggtggacttcctgaactgggaggtcaccgaccacaacctgcacgagctgcgcgtgctgcggcgttaccggctgcagcggcgggaggactacacgcgctacaaccagctgagccgtgccgtgcgtgagctggcgcggcgcctgcgcgacctgcccgaacgcgaccagttccgcgtgcgcgcttcggccgcgctgctggacaagctgtatgctctcggcttggtgcccacgcgcggttcgctggagctctgcgacttcgtcacggcctcgtccttctgccgccgccgcctccccaccgtgctcctcaagctgcgcatggcgcagcaccttcaggctgccgtggcctttgtggagcaagggcacgtacgcgtgggccctgacgtggttaccgaccccgccttccttgtcacgcgcagcatggaggactttgtcacttgggtggactcgtccaagatcaagcggcacgtgctagagtacaatgaggagcgcgatgacttcgatctggaagcctagcggatctcccactttgcatggctgtcttttacagatgggaaaactgaggcctgatgctggagattctatganggtgctctcctcaagggtatcagacggtcgtangttcttaagaatttgattcatcagtggcaggccatgcataaagccacgggaggtgcgtccttgttttcaagnaaatgttcttaaaacttggactactgattattaattgactgtgccttggnaaanantgggaaataacttggtgcaacactgggggtattgttggcttcttgtgtngnaanntttgtaatgtaaaaagnaaaaactggaaatccccccnccctgntttcccttnatcgtcttggggttgnantggttcaattcntttaantcnaatnnttgctcctggccnnggttaaactgtntaaaaaaaaagnaaaattnggcccnaantttttaaaaantgaacg

SEQ ID NO: 551 - DNA, 1234 bp, Homo sapiens
  misc_feature (747)..(747): n is a, c, g, or t
  misc_feature (778)..(778): n is a, c, g, or t
  misc_feature (859)..(859): n is a, c, g, or t
  misc_feature (864)..(864): n is a, c, g, or t
  misc_feature (866)..(866): n is a, c, g, or t
  misc_feature (871)..(871): n is a, c, g, or t
  misc_feature (875)..(875): n is a, c, g, or t
  misc_feature (877)..(877): n is a, c, g, or t
  misc_feature (928)..(928): n is a, c, g, or t
  misc_feature (930)..(930): n is a, c, g, or t
  misc_feature (940)..(940): n is a, c, g, or t
  misc_feature (947)..(947): n is a, c, g, or t
  misc_feature (953)..(953): n is a, c, g, or t
  misc_feature (982)..(982): n is a, c, g, or t
  misc_feature (1004)..(1004): n is a, c, g, or t
  misc_feature (1024)..(1024): n is a, c, g, or t
  misc_feature (1026)..(1026): n is a, c, g, or t
  misc_feature (1039)..(1040): n is a, c, g, or t
  misc_feature (1042)..(1042): n is a, c, g, or t
  misc_feature (1062)..(1062): n is a, c, g, or t
  misc_feature (1080)..(1080): n is a, c, g, or t
  misc_feature (1090)..(1090): n is a, c, g, or t
  misc_feature (1096)..(1096): n is a, c, g, or t
  misc_feature (1105)..(1105): n is a, c, g, or t
  misc_feature (1110)..(1110): n is a, c, g, or t
  misc_feature (1113)..(1113): n is a, c, g, or t
  misc_feature (1125)..(1125): n is a, c, g, or t
  misc_feature (1133)..(1134): n is a, c, g, or t
  misc_feature (1136)..(1136): n is a, c, g, or t
  misc_feature (1161)..(1161): n is a, c, g, or t
  misc_feature (1165)..(1167): n is a, c, g, or t
  misc_feature (1177)..(1177): n is a, c, g, or t
  misc_feature (1179)..(1179): n is a, c, g, or t
  misc_feature (1181)..(1181): n is a, c, g, or t
  misc_feature (1183)..(1183): n is a, c, g, or t
  misc_feature (1185)..(1186): n is a, c, g, or t
  misc_feature (1201)..(1201): n is a, c, g, or t
  misc_feature (1207)..(1207): n is a, c, g, or t
  misc_feature (1209)..(1209): n is a, c, g, or t
  misc_feature (1211)..(1211): n is a, c, g, or t
  misc_feature (1229)..(1229): n is a, c, g, or t
gcccacgcgtccgtggtgctggaacagttcctgagcgcgctgcccgccgacacgcaggcctgggtgtgcagccggcagccgcagagcggggaggaggcggtggccctgctggaggagctctgggggccagcagcctcccccgatgggtcgtcagcaacgagggtgcctcaggatgtgacgcagggccctggggccacaggtggaaaggaggacagtgggatgattcccttaggcaccgcccctggggctgaggggccggcgcctggggactcccaggctgtgcgcccctacaagcaggagcccagcagccccccgctggcgcctggcctgcccgccttcctagcggccccgggcaccacgtcctgccccgagtgcggcaaaacgtccctgaaaccagctcacctgctgcgccaccggcagagccactcgggcgagaagccgcacgcctgccctgagtgcgggaaggcctttcggcgcaaggagcacctgcggcgccaccgcgacacgcaccccggcagccccggcagccccgggcccgcgctgcgccctctgcccgcccgtgagaagccccacgcgtgctgcgagtgtggcaagaccttctactggcgcgagcacctggtgcgccaccgcaagacgcactcgggagcgcggccctttgcctgctgggagtgtggcaagggcttcgggcgccgcgagcacgtgctgcgccaccagcgcatccacggccgggcagcggccagcgcgcanggggcggtagctccgggcccggatggtggangcccctttccgccctggccttgggttagccgcctcccggccagcgccatctccgcccttggtgctgcccccgggcggtacntgctntntccancgcnanttggcctcttcctctcttctttcctccaatcgtcttcttcaacttgggctncnttgtttgaanttccaangccttnctattcttttcaattctttttccccaaantttaattttttttttaaggttnacttaacccccccttttccntnattttcggctttnncntggtgaaagggcctctcccnaaggttcctctttccccntttttttttntggggncaacctccnttccnccnattttttttccngccttttnncnaaaaaaaaataaaattggaacttanggannnaaaaaatttngncnancnncccttttaaaaaaanaaaaangntngttttccaaaatttcccnaaatg

SEQ ID NO: 552 - DNA, 986 bp, Homo sapiens
  misc_feature (714)..(714): n is a, c, g, or t
  misc_feature (723)..(723): n is a, c, g, or t
  misc_feature (727)..(727): n is a, c, g, or t
  misc_feature (744)..(744): n is a, c, g, or t
  misc_feature (767)..(767): n is a, c, g, or t
  misc_feature (863)..(863): n is a, c, g, or t
  misc_feature (876)..(876): n is a, c, g, or t
  misc_feature (887)..(887): n is a, c, g, or t
  misc_feature (898)..(898): n is a, c, g, or t
  misc_feature (911)..(912): n is a, c, g, or t
  misc_feature (916)..(916): n is a, c, g, or t
  misc_feature (932)..(932): n is a, c, g, or t
  misc_feature (942)..(942): n is a, c, g, or t
  misc_feature (944)..(944): n is a, c, g, or t
  misc_feature (949)..(949): n is a, c, g, or t
  misc_feature (956)..(956): n is a, c, g, or t
  misc_feature (963)..(964): n is a, c, g, or t
  misc_feature (967)..(967): n is a, c, g, or t
  misc_feature (969)..(969): n is a, c, g, or t
  misc_feature (976)..(977): n is a, c, g, or t
  misc_feature (982)..(982): n is a, c, g, or t
  misc_feature (985)..(985): n is a, c, g, or t
ggtgggctgggccacgcagtcgccgctcaccgcgcgggacgcggctctctccctcccaccctcgggcccagagcgcgagcagctgcaggcggaagcgagcgagcgcttcgctgccggctacatccagtgcatgcacgaggtgcacacgttcgtgtccacgtgccaggccatcgacgctaccgtcgctgccgagctcctgaaccatctgctcgagtccatgccgctgcgtgagggcagcagcttccaggatctgctgggggacgccctggcggggccacctagagcccctggacggagtggctggcctgcggggggcgctccgggatccccaatacccagccccccgggtcctggggacgacctgtgctccgacctggaggaggcccctgaggctgaactgagtcaggctcctgctgaggggcccgacttggtgcccgcagccctgggcagcctgaccacagcccaaattgcccggagtgtctggaggccttggtgaccaatgccagccagagtcctgcgggggtgggcccggccctccctggatctcctccctcctcccaggggttcagatgtggtggggtagggccctggaagtctcccaggtcttccctccctcctctgatggatggcttgcagggcagcccctggtaaccagcccagtcaggccccagccccgtttcttaagaaacttttagggaccctgcagctctggantgggtggangganggagctacgggcaggangaaaaattttgtaaagctgccancgctctcccaggttcacccacccagcttcacaagccctgtgcggctctgggggcaaaagtggcaaaaatggtgctgggcactaatgttccaggcanccttgggctaaanaaaacttgaanttgcacttcancgggaaaaaaaannaagngcactgaactgcatgnccaaaactgnangtctnaaatttngttttannaantnaatttgnnattcnttna

SEQ ID NO: 553 - DNA, 1091 bp, Homo sapiens
  misc_feature (764)..(764): n is a, c, g, or t
  misc_feature (805)..(805): n is a, c, g, or t
  misc_feature (814)..(814): n is a, c, g, or t
  misc_feature (820)..(820): n is a, c, g, or t
  misc_feature (823)..(823): n is a, c, g, or t
  misc_feature (833)..(833): n is a, c, g, or t
  misc_feature (850)..(850): n is a, c, g, or t
  misc_feature (859)..(859): n is a, c, g, or t
  misc_feature (867)..(867): n is a, c, g, or t
  misc_feature (870)..(870): n is a, c, g, or t
  misc_feature (892)..(892): n is a, c, g, or t
  misc_feature (931)..(931): n is a, c, g, or t
  misc_feature (969)..(969): n is a, c, g, or t
  misc_feature (975)..(976): n is a, c, g, or t
  misc_feature (978)..(978): n is a, c, g, or t
  misc_feature (985)..(985): n is a, c, g, or t
  misc_feature (996)..(996): n is a, c, g, or t
  misc_feature (1005)..(1005): n is a, c, g, or t
  misc_feature (1007)..(1007): n is a, c, g, or t
  misc_feature (1010)..(1010): n is a, c, g, or t
  misc_feature (1016)..(1018): n is a, c, g, or t
  misc_feature (1023)..(1023): n is a, c, g, or t
  misc_feature (1027)..(1027): n is a, c, g, or t
  misc_feature (1031)..(1031): n is a, c, g, or t
  misc_feature (1034)..(1034): n is a, c, g, or t
  misc_feature (1042)..(1042): n is a, c, g, or t
  misc_feature (1048)..(1048): n is a, c, g, or t
  misc_feature (1050)..(1050): n is a, c, g, or t
  misc_feature (1058)..(1058): n is a, c, g, or t
  misc_feature (1067)..(1067): n is a, c, g, or t
  misc_feature (1069)..(1069): n is a, c, g, or t
ggggcaggtgtcatctttccagtggggaggctgatgcgttatctgaagaaagggacgttcaagtaccggatcagcgtgggcgcccctgtctacatggcggcagtcattgagtacctggcagcggaaattctagaattggccggcaatgccgcgagggacaacaagaaggcccggatagccccgagacacatcttgctggcagttgccaatgacgaggagctcaaccagctgctaaaaggagtgaccatcgccagtggaggcgtcctgcccagaattcaccccgaactgctggccaaaaagcgagggaccaaaggcaagtcggaaacgatcctctccccacccccagagaaaagaggcaggaaggccacgtcaggcaagaagggggggaagaaatccaaggctgccaaaccacggacgtccaaaaagtccaaaccaaaggacagcgataaagaaggaacttcaaattccacctctgaagatgggccaggggatggattcaccattctgtcttctaagagccttgttctgggacagaagctgtccttaacccagagtgacatcagccatattggctccatgagagtggagggcattgtccacccaaccacagccgaaattgacctcaaagaagatataggtaaagccttggaaaaaggctgggggaaaagagttcttggaaacggtaaaggagcttcgcaaatcccaaggccctttggaagtcgccgaagccgccgtcagccaatccagtggactcgcagccaaantttgtcatccactgtcacattccctcagtgggggctccganaatgtgaanaacagnttngaaaaaaacnttcaaaaactgcctgtnagcggcggnaagaaaanaancttaagtccgttgcgttcccgncttttccccagcggcaaaaactgcttttcccaaaaagantgcggcccaggtgaacccttcaaagccctctcaccccnttttannantccaagnccgtcctcccnttaaaaacntnttntttctnnntcttnaaancaanagnttcggctnttagtncnaggaaatngccaaattncnacccaaatacccccccttttcc

SEQ ID NO: 554 - DNA, 1019 bp, Homo sapiens
  misc_feature (690)..(690): n is a, c, g, or t
  misc_feature (719)..(719): n is a, c, g, or t
  misc_feature (752)..(752): n is a, c, g, or t
  misc_feature (775)..(775): n is a, c, g, or t
  misc_feature (840)..(840): n is a, c, g, or t
  misc_feature (863)..(863): n is a, c, g, or t
  misc_feature (865)..(865): n is a, c, g, or t
  misc_feature (887)..(887): n is a, c, g, or t
  misc_feature (902)..(902): n is a, c, g, or t
  misc_feature (904)..(904): n is a, c, g, or t
  misc_feature (918)..(918): n is a, c, g, or t
  misc_feature (926)..(926): n is a, c, g, or t
  misc_feature (936)..(937): n is a, c, g, or t
  misc_feature (941)..(941): n is a, c, g, or t
  misc_feature (955)..(955): n is a, c, g, or t
  misc_feature (960)..(961): n is a, c, g, or t
  misc_feature (971)..(971): n is a, c, g, or t
  misc_feature (976)..(976): n is a, c, g, or t
  misc_feature (979)..(979): n is a, c, g, or t
  misc_feature (986)..(987): n is a, c, g, or t
  misc_feature (989)..(989): n is a, c, g, or t
  misc_feature (991)..(991): n is a, c, g, or t
  misc_feature (997)..(997): n is a, c, g, or t
  misc_feature (1002)..(1002): n is a, c, g, or t
  misc_feature (1008)..(1008): n is a, c, g, or t
  misc_feature (1011)..(1011): n is a, c, g, or t
  misc_feature (1015)..(1015): n is a, c, g, or t
  misc_feature (1018)..(1018): n is a, c, g, or t
gatcaaaacgaggacgaacccattcgtgttagctaccatcggaatatccactataattcagtggtgaatcctaacaaggccaccattggtgtggggctgggcctgccatcattcaaaccagggtttgcagagcagtctctgatgaagaatgccataaaaacatcggaggagtcatggattgaacagcagatgctagaagacaagaaacgggccacagactgggaggccacaaatgaagccatcgaggagcaggtggctcgggaatcctacctgcagtggttgcgggatcaggagaaacaggctcgccaggtccgaggccccagccagccccggaaagccagcgccacatgcagttcggccacagcagcagcctccagtggcctggaggagtggactagccggtccccgcggcagcggagttcagcctcgtcacctgagcaccctgagctgcatgctgaattgggcatgaagcccccttccccaggcactgttttagctcttgccaaacctccttcgccctgtgcgccaggtacaagcagtcagttctcggcaggggccgaccgggcaacttccccccttgtgtccctctaccctgctttggagtgccgggccctcattcagcagatgtccccctctgcctttggtaagcctcctttgtctggggggatggaggctgctaggagctggganagactggaagaagtggcaagtcctgaaangggctttctggagcctctggccatctccccaanaaaagaagggagaggcactggangggatttttcagatccaagggaatttgccccaaaagggtctggggtctaaatggggtttcacagncctaacaaatccttctgtttttnanaaaggagtgaaaaggggccctntgggaatttctccananccccaaatgtcggnccaaggtnaaggaaaagnnaggntaaaaacccctccnatcanncctttttctntttcnccnccccccnnangntttaantgaangggatnaangatnaant

SEQ ID NO: 555 - DNA, 815 bp, Homo sapiens
ggtttttcacagtacgttaacggggagatgaattcgccgactctgtcttgcagagggcgtgtgcgtcatcccacgttgcctgggaaaacaagcattaacaagtgtgagcgcgggtcaccgtggaaatggtacagaagggggcccacggcgggatcattagtgttactttgcccctggaggaagaaggccctgcgtcatttcccatccagagtgggaaagggagagagactgagagataaaaaggaaaataaacagcccttttttatttatttatttttttttgagacggagttttgctcttgttgcccaggctggagtgcagtggcgcgatctcggctcactgcaacctctgcctcccaggttcaaacgattctcctgcctcagcctcctgagtagctgggattacaagtgcttgccaccatgcccggaacatttttatatttttggtagagacggggtttcaccatgttgatcaggctggtcttgaactcctgacctcaagtgatctgcccacctcagcctcccaaagtgctgtgattacaggcatgagccactgcgccgggccataaatagccttttatagcaataagttgtgctcagaaaaagccccgacgtggcatgaactctttgcagtgccagagtagaagttacaggcacggaggagagaggactccccaggccagcatcttccttgtcaccatcccacagggggttgcctgcctgaccagacgttgactatgttgtttgcccaaacagggaaaagttaagaagccaggaggtcaaatgtcgacccggaagttcacccatgcgcgctg

SEQ ID NO: 556 - DNA, 1100 bp, Homo sapiens
  misc_feature (711)..(711): n is a, c, g, or t
  misc_feature (742)..(742): n is a, c, g, or t
  misc_feature (793)..(793): n is a, c, g, or t
  misc_feature (796)..(796): n is a, c, g, or t
  misc_feature (810)..(810): n is a, c, g, or t
  misc_feature (818)..(818): n is a, c, g, or t
  misc_feature (824)..(824): n is a, c, g, or t
  misc_feature (827)..(827): n is a, c, g, or t
  misc_feature (830)..(830): n is a, c, g, or t
  misc_feature (838)..(838): n is a, c, g, or t
  misc_feature (869)..(869): n is a, c, g, or t
  misc_feature (877)..(877): n is a, c, g, or t
  misc_feature (879)..(879): n is a, c, g, or t
  misc_feature (885)..(885): n is a, c, g, or t
  misc_feature (903)..(903): n is a, c, g, or t
  misc_feature (907)..(907): n is a, c, g, or t
  misc_feature (913)..(913): n is a, c, g, or t
  misc_feature (958)..(958): n is a, c, g, or t
  misc_feature (963)..(963): n is a, c, g, or t
  misc_feature (974)..(974): n is a, c, g, or t
  misc_feature (976)..(976): n is a, c, g, or t
  misc_feature (980)..(980): n is a, c, g, or t
  misc_feature (983)..(983): n is a, c, g, or t
  misc_feature (985)..(985): n is a, c, g, or t
  misc_feature (991)..(991): n is a, c, g, or t
  misc_feature (999)..(1000): n is a, c, g, or t
  misc_feature (1006)..(1006): n is a, c, g, or t
  misc_feature (1010)..(1010): n is a, c, g, or t
  misc_feature (1014)..(1014): n is a, c, g, or t
  misc_feature (1017)..(1020): n is a, c, g, or t
  misc_feature (1029)..(1029): n is a, c, g, or t
  misc_feature (1047)..(1047): n is a, c, g, or t
  misc_feature (1054)..(1054): n is a, c, g, or t
  misc_feature (1064)..(1064): n is a, c, g, or t
  misc_feature (1073)..(1073): n is a, c, g, or t
  misc_feature (1079)..(1079): n is a, c, g, or t
  misc_feature (1088)..(1088): n is a, c, g, or t
  misc_feature (1097)..(1097): n is a, c, g, or t
gggcgcgtgggggcgcacagcctctggtgcacatggcttcctccccggcggtggacgtgtcctgcaggcggcgggagaagcggcggcagctggacgcgcgccgcagcaagtgccgcatccgcctgggcggccacatggagcagtggtgcctcctcaaggagcggctgggcttctccctgcactcgcagctcgccaagttcctgttggaccggtacacttcttcaggctgtgtcctctgtgcaggtaggtaggggatggcagggggtgagagccagagggaagagggaccacagggtgacccagaaacaccctcctttcaaagggagccctgagtaagtttgggaagggtggggtgagttggggagcacagggtagtttgatggaggcaacctctgggtggggaagggagcaatgtctcaggatctagtgtgtctaggttctgaagaatgataaattggactggggctgaggttgccctggggtttgagggaacagggctccctgggtatggctctccagggtaagaggaggagacttcccagttcagcctgactgcttcccccacccctccaggtcctgagcttttgcctccaaaaggtctgcagtatctggtgctcttgtctcatgcccacagccgagagtgcagcctggtgcccgggcttcgggggcctggcggccaaaatggggggcttgtgtgggagtgctcagcangccataccttctcctggggaccctctttganccctacaccttcagaggcacccaagccagcctcccttccacatactactcnganaaattggtgttccnaggccacnagtggncangancttgcaantttggaatctgaacatgatgaaagactcaanaggccagntngcccanaaggtgggaacccccacnaaanaacttnccacctccagaaaagaaaaaggtgaggaaaaaaagaacaatgatnagatnaaaaagaaatncncatnatncnacttanggaacttnncctccncccnaaanaannnnaacctgaancccccaaaaaatgccttnccctgtncctggaaacnaaaaaaggnaaaacnccaaccccntgaaaactncca

SEQ ID NO: 557 - DNA, 1091 bp, Homo sapiens
  misc_feature (821)..(821): n is a, c, g, or t
  misc_feature (858)..(858): n is a, c, g, or t
  misc_feature (868)..(868): n is a, c, g, or t
  misc_feature (882)..(882): n is a, c, g, or t
  misc_feature (885)..(885): n is a, c, g, or t
  misc_feature (908)..(908): n is a, c, g, or t
  misc_feature (934)..(934): n is a, c, g, or t
  misc_feature (942)..(942): n is a, c, g, or t
  misc_feature (949)..(950): n is a, c, g, or t
  misc_feature (962)..(962): n is a, c, g, or t
  misc_feature (1002)..(1003): n is a, c, g, or t
  misc_feature (1008)..(1008): n is a, c, g, or t
  misc_feature (1015)..(1015): n is a, c, g, or t
  misc_feature (1019)..(1019): n is a, c, g, or t
  misc_feature (1035)..(1035): n is a, c, g, or t
  misc_feature (1043)..(1043): n is a, c, g, or t
  misc_feature (1046)..(1046): n is a, c, g, or t
  misc_feature (1048)..(1048): n is a, c, g, or t
  misc_feature (1060)..(1060): n is a, c, g, or t
  misc_feature (1062)..(1062): n is a, c, g, or t
  misc_feature (1070)..(1070): n is a, c, g, or t
gagctacctccggacgctctcaagatggcgacctctctgggttccaacacctacaacaggcagaactgggaggatgcggacttccccattctgtgccagacatgtcttggagaaaacccatatatccgaatgaccaaagaaaagtatgggaaggaatgcaaaatctgtgccaggccattcacagtgtttcgctggtgccctggagtccgcatgcgtttcaagaagactgaagtgtgccaaacctgcagtaaattgaagaatgtctgtcagacctgcctcttagacctagagtatggcctgcccatccaggttcgtgacgcaggattgtcttttaaagatgacatgccaaagtcagatgtcaacaaagagtactatacacagaatatggagagagagatttctaactctgatggaacacggccagttggcatgctggggaaagccacatctaccagtgacatgctgctcaaactggcccggaccacaccctactacaaaaggaatcgaccccacatttgctccttctgggtgaaaggagagtgtaagagaggagaggaatgtccatacagacatgagaagcctacagatccagatgacccccttgctgatcagaatattaaagaccgttattacggaatcaatgatcctgtagctgacaagcttctaaagcgggcttcaacaatgcctcggctggacccaccagaggataaaactatcaccacactatatgttggtggtctaggtgataccattactgagacagatttaagaaatcatttctaccagttcggaaagatccggacgatcactgttgtgcaganacagcagtgtgctttcatccagtttgccccacggcangctgcaaaantggctgctgaaaantcnttaataattgattgtaatggccncaactgaatgtgaatgggaaaatccngccgccanaggaaannaaaaaaaaaganggactccgactctggatcaactaaacctgttccagatgcnngaccntcctccnctcngccacaaaaaaaaccnttgcaatnttnantgccccaagggncncccctggngaaattgtttgcccccccctg

SEQ ID NO: 558 - DNA, 851 bp, Homo sapiens
ggcgccaagttcaaaatcagctcggacttgaaaaggcacatgcgggtgcactcgggggagaagcctttcaagtgcgagttctgcaatgtccgctgcaccatgaaggggaacctcaagtcgcacatccgtatcaagcacagcgggaataacttcaagtgtcctcattgcgacttcctgggtgacagcaaagccaccctccggaagcacagccgcgtgcaccagtcggagcatcctgagaagtgctcggaatgcagctactcctgctccagcaaggccgccctgcgcatccacgagcgtatccactgcaccgaccgccctttcaagtgcaactactgcagcttcgacaccaaacagcccagcaacctgagcaagcacatgaagaagttccatggggacatggttaagactgaggctctagagaggaaggacaccggcaggcagagcagccggcaggtggccaagctggatgccaagaagagtttccactgcgatatatgcgatgcctccttcatgcgggaggactcgctccgcagccacaagagacagcacagtgagtacagtgagagtaagaactcggacgtgaccgttctccagtttcagatcgaccccagcaagcagcccgccacgcccctcactgtgggacacctccaggtgcccctccagcccagccaagtgccccagttcagcgagggaagagtcaaaatcatcgttgggcatcaggtgccccaggcgaacaccatcgtccaggctgccgccgctgcagtgaacatcgtcccgcctgccttggtggcccagaacccagaggaactcccagggaacagccggctgcagatcctgcgccaggtcagtct

SEQ ID NO: 559 - DNA, 1291 bp, Homo sapiens
  misc_feature (806)..(806): n is a, c, g, or t
  misc_feature (845)..(845): n is a, c, g, or t
  misc_feature (856)..(856): n is a, c, g, or t
  misc_feature (874)..(874): n is a, c, g, or t
  misc_feature (881)..(881): n is a, c, g, or t
  misc_feature (895)..(895): n is a, c, g, or t
  misc_feature (908)..(908): n is a, c, g, or t
  misc_feature (920)..(920): n is a, c, g, or t
  misc_feature (941)..(941): n is a, c, g, or t
  misc_feature (946)..(946): n is a, c, g, or t
  misc_feature (949)..(949): n is a, c, g, or t
  misc_feature (955)..(956): n is a, c, g, or t
  misc_feature (959)..(959): n is a, c, g, or t
  misc_feature (962)..(962): n is a, c, g, or t
  misc_feature (964)..(964): n is a, c, g, or t
  misc_feature (974)..(975): n is a, c, g, or t
  misc_feature (988)..(988): n is a, c, g, or t
  misc_feature (994)..(994): n is a, c, g, or t
  misc_feature (1000)..(1000): n is a, c, g, or t
  misc_feature (1007)..(1007): n is a, c, g, or t
  misc_feature (1013)..(1013): n is a, c, g, or t
  misc_feature (1034)..(1034): n is a, c, g, or t
  misc_feature (1045)..(1045): n is a, c, g, or t
  misc_feature (1075)..(1075): n is a, c, g, or t
  misc_feature (1092)..(1094): n is a, c, g, or t
  misc_feature (1097)..(1097): n is a, c, g, or t
  misc_feature (1103)..(1103): n is a, c, g, or t
  misc_feature (1136)..(1136): n is a, c, g, or t
  misc_feature (1147)..(1147): n is a, c, g, or t
  misc_feature (1157)..(1157): n is a, c, g, or t
  misc_feature (1162)..(1163): n is a, c, g, or t
  misc_feature (1173)..(1173): n is a, c, g, or t
  misc_feature (1177)..(1177): n is a, c, g, or t
  misc_feature (1186)..(1186): n is a, c, g, or t
  misc_feature (1195)..(1195): n is a, c, g, or t
  misc_feature (1199)..(1199): n is a, c, g, or t
  misc_feature (1205)..(1205): n is a, c, g, or t
  misc_feature (1215)..(1215): n is a, c, g, or t
  misc_feature (1224)..(1224): n is a, c, g, or t
  misc_feature (1229)..(1229): n is a, c, g, or t
  misc_feature (1242)..(1242): n is a, c, g, or t
  misc_feature (1248)..(1248): n is a, c, g, or t
  misc_feature (1258)..(1259): n is a, c, g, or t
  misc_feature (1276)..(1277): n is a, c, g, or t
  misc_feature (1285)..(1285): n is a, c, g, or t
ggtgctgagttacaccagaatgtaaatgtgaagaacataatcattgctttaattgatagattagctttatttgctcaccgtgaagatggacctggaatcccagcggatattaaactttttgatatattttcacagcaggtggctacagtgatacagtctagacaagacatgccttcagaggatgttgtatctttacaagtctctctgattaatcttgccatgaaatgttaccctgatcgtgtggactatgttgataaagttctagaaacaacagtggagatattcaataagctcaaccttgaacatattgctaccagtagtgcagtttcaaaggaactcaccagacttttgaaaataccagttgacacttacaacaatattttaacagtcttgaaattaaaacattttcacccactctttgagtactttgactacgagtccagaaagagcatgagttgttatgtgcttagtaatgttctggattataacacagaaattgtctctcaagaccaggtggattccataatgaatttggtatccacgttgattcaagatcagccagatcaacctgtagaagaccctgatccagaagattttgctgatgagcagagccttgtgggccgcttcattcatctgctgcgctctgaggaccctgaccagcagtacttgattttgaacacagcacgaaaacattttggagctggtggaaatcagcggattcgcttcacactgccacctttggtatttgcagcttaccagctggctttccgatataaagagaattctaaagtggatgacaaatgggnaaaagaaatgccagaagaattttttcatttgcccaccanaactatcaggngctttgatcaaagcaganctggcanaattgccccttaanacttttttcctcnaggaacccctanctggctggggaaattggtttngaaantcntggaanngtnccntntgaattccgnnccaggcattttcnctggangaaaangaaatcngcgatnccaagccaagctagcggcccncccctggatcntggcccttttgaaaggaggaagggcttccngaaaaaaacctgaaccnnngangacccnggggccctggggccccaacttctaaaaacctgntaggggccaantgggaccccngggcnnccctcggggngggnaaaacgganaaaaggggngganctccgngccaaggganggggggccnaaaancccaaaaaaaaangggggnccccccaggnnttttaaatcgaaaaaannttttaaanaagggg

SEQ ID NO: 560 - DNA, 1093 bp, Homo sapiens
  misc_feature (860)..(860): n is a, c, g, or t
  misc_feature (884)..(884): n is a, c, g, or t
  misc_feature (889)..(889): n is a, c, g, or t
  misc_feature (900)..(900): n is a, c, g, or t
  misc_feature (914)..(914): n is a, c, g, or t
  misc_feature (936)..(936): n is a, c, g, or t
  misc_feature (949)..(949): n is a, c, g, or t
  misc_feature (951)..(951): n is a, c, g, or t
  misc_feature (957)..(957): n is a, c, g, or t
  misc_feature (962)..(962): n is a, c, g, or t
  misc_feature (975)..(975): n is a, c, g, or t
  misc_feature (978)..(978): n is a, c, g, or t
  misc_feature (982)..(982): n is a, c, g, or t
  misc_feature (984)..(984): n is a, c, g, or t
  misc_feature (989)..(989): n is a, c, g, or t
  misc_feature (994)..(994): n is a, c, g, or t
  misc_feature (997)..(997): n is a, c, g, or t
  misc_feature (1011)..(1011): n is a, c, g, or t
  misc_feature (1021)..(1021): n is a, c, g, or t
  misc_feature (1034)..(1034): n is a, c, g, or t
  misc_feature (1042)..(1042): n is a, c, g, or t
  misc_feature (1044)..(1045): n is a, c, g, or t
  misc_feature (1060)..(1060): n is a, c, g, or t
  misc_feature (1065)..(1065): n is a, c, g, or t
  misc_feature (1067)..(1067): n is a, c, g, or t
  misc_feature (1070)..(1070): n is a, c, g, or t
  misc_feature (1073)..(1073): n is a, c, g, or t
gcccacgcgtccgagatagagttccttgtgaaccacatggacttggccaaaggtcatataaaggcccttcaggaaggagatcttgcttcttccagaggcattgaggcctgcaccaatgctgctgatgcccttctgcagtgcatgaatgtagctcttcgaccaggccatgacttgcttctggcagtcaaacagcaacagcagcgattcagtgatttgcgagagctttttgcccggagactggccagtcacctcaacaatgtttttgttcaacagggtcatgatcagagttcgactcttgcccaacactctgttgaactgactttacccaatcatcatccatttcatagagatttgctccgatatgccaagctgatggagtggctaaagagtacagattatggaaaatatgaaggactaacaaagaattacatggattatttatcccgactatatgaaagagaaatcaaagatttctttgaagttgcaaagatcaagatgactggcacaactaaagaaagcaagaagtttgctacactgcctcgaaaagaaagtgctgtcaaacaggaaacagagagtcttcatggaagttcggggaaattaactggatctacttctagtctaaataagctcagtgttcagagttcagggaatcgcagatctcagtcatcttccctgttggatatgggaaacatgtctgcctctgatctcgatgttgctgacaggaccaaatttgataagatctttgaacaggtactaagtgaactggagcccctatgtctggcaaaacaggacttcataagtaaatttttcaaactacagcaacatcaaagtatgccctggaactatggctgaagcaaagnacctggaatggaggaacattatcncggcnaacataattgngggcacaccactgnctggtttcatctgaaaaaaaanatgatcccccaangnatgatnaaaanatttccctgcatnganccananctgancaacntanttgctttaggaaanaaaattgaancctttaactcccnttaatgtnanncaaaaggaatcctcnggggngnacngcnaaaaaggggaacccggcttt

SEQ ID NO: 561 - DNA, 1057 bp, Homo sapiens
  misc_feature (782)..(782): n is a, c, g, or t
  misc_feature (809)..(809): n is a, c, g, or t
  misc_feature (858)..(858): n is a, c, g, or t
  misc_feature (872)..(872): n is a, c, g, or t
  misc_feature (883)..(883): n is a, c, g, or t
  misc_feature (892)..(892): n is a, c, g, or t
  misc_feature (900)..(900): n is a, c, g, or t
  misc_feature (918)..(918): n is a, c, g, or t
  misc_feature (932)..(932): n is a, c, g, or t
  misc_feature (937)..(937): n is a, c, g, or t
  misc_feature (974)..(974): n is a, c, g, or t
  misc_feature (985)..(985): n is a, c, g, or t
  misc_feature (996)..(996): n is a, c, g, or t
  misc_feature (1001)..(1001): n is a, c, g, or t
  misc_feature (1007)..(1007): n is a, c, g, or t
  misc_feature (1010)..(1010): n is a, c, g, or t
  misc_feature (1022)..(1022): n is a, c, g, or t
  misc_feature (1035)..(1038): n is a, c, g, or t
  misc_feature (1040)..(1047): n is a, c, g, or t
  misc_feature (1049)..(1057): n is a, c, g, or t
gcccacgcgtccggtcagggcgcacaaaccccaggagagaaggcggaagcagcagcgactctaaaggcagccccaggctggctaaagcggttcctggtatggaaacctaggcccgcgagtgcccgggcccagcccggcctagttcaggaagcagctcagccccagggcagcacatcagagacaccatggaacacagccattcctctgccgtcgtgctgggaccagtctttcctgaccaatatcaccttcttgaaggttcttctctggttggtcctgctgggactgtttgtggaactggaatttggcctggcatattttgtcctgtccttgttctattggatgtacgtcgggacacgaggccctgaagagaagaaagagggagagaagagcgcctactctgtgttcaatccaggctgtgaagccatccagggcaccctgactgcagagcagttggagcgcgagttacagttgagacccctggcagggagataggacccagctgtgctgtcatgcagctaacctctgatgtggtcttcctcaccattggctatggatttgatttcaggtgtataggactaagggcagcttgcgggttagctctgtgactgcatagtttttctaccttctttccctgatcttttgctgccatttgatctttgatagttttggtgaaactctctaaaatacattcactgtgggtccgacgcaatttataaaaattatgtactcaagaagggagacctgtttgtttcatttctcatctgtttgggagatgagtttanagcactagaaaggcactggggaaaatnctcagcttaaaacatccagcagtttgaagtatgattaggtacatcaggnctgcattgtcaagnttctctttaantcttttaanatttatancaatttttttttttcccngaaaagtttaggtngcaantttggggttcctggttggtttttgttttgcttcccgnctttaaattcnttaattttcanccatnacgggnatngaaaaaaaaaantctttaaaccaannnnannnnnnnnannnnnnnnn

SEQ ID NO: 562 - DNA, 1086 bp, Homo sapiens
  misc_feature (832)..(832): n is a, c, g, or t
  misc_feature (838)..(838): n is a, c, g, or t
  misc_feature (852)..(852): n is a, c, g, or t
  misc_feature (893)..(893): n is a, c, g, or t
  misc_feature (904)..(904): n is a, c, g, or t
  misc_feature (908)..(908): n is a, c, g, or t
  misc_feature (942)..(942): n is a, c, g, or t
  misc_feature (975)..(976): n is a, c, g, or t
  misc_feature (988)..(988): n is a, c, g, or t
  misc_feature (990)..(990): n is a, c, g, or t
  misc_feature (994)..(994): n is a, c, g, or t
  misc_feature (1000)..(1000): n is a, c, g, or t
  misc_feature (1006)..(1006): n is a, c, g, or t
  misc_feature (1012)..(1012): n is a, c, g, or t
  misc_feature (1026)..(1026): n is a, c, g, or t
  misc_feature (1031)..(1031): n is a, c, g, or t
  misc_feature (1033)..(1033): n is a, c, g, or t
  misc_feature (1045)..(1045): n is a, c, g, or t
  misc_feature (1085)..(1085): n is a, c, g, or t
gctctgcctgtcatgtatgcagtagcgcttgaccttcgagtgtttgccaataatgcagatcaacagttggtaaagaaaggaaaaagcaaagttggggacatgttggaaaaagcagcagagttactgatgagctgtttccgggtctgtgccagcgacacccgtgctggtatagaggactctaagaagtggggcatgctgtttctggtgaaccagctgtttaaaatctacttcaagatcaacaaactccatttatgtaaacccctaattagagcaattgacagctcaaacctgaaagacgattacagcactgcacagagagtaacatacaaatactacgttggacgcaaggctatgtttgacagcgattttaagcaagctgaggagtacctgtcatttgcctttgagcattgtcaccgttctagtcagaagaacaaaaggatgattctgatctatttgcttccagtaaaaatgctattgggtcacatgcccactgtggagctcctgaaaaagtatcacctgatgcagtttgcggaagtaaccagagctgtgagcgagggcaacctgctgctgctgcacgaggcgctggcgaagcacgaggccttcttcattcgctgcggaatcttcctcatcctggagaagctgaagatcatcacctacaggaacctctttaagaaagtgtatttgttactgaaaacacaccagctgtctctggatgcttttctggttgccttgaagttcatgcaggtggaggacgtggacattgacgaagttcagtgtattctggctaacttgatatacatggggacacgtcaaaggctacatatcgcatcancatcanaagctgggggtcancaagccaaaacccatttcccccccctgtccacgggggggtngaaagtaaccngaancccccaaggacggaactcggctgggttctggaantctttgggaaacttctttgaaggaggctttgcnngaaggctgctcngnctcncttttncctaantggggntcccgaaaggctgnccttngnaacttttggaanttctttgggaaaaagcgtatccgaaatttaaccctggcang

SEQ ID NO: 563 - DNA, 1088 bp, Homo sapiens
  misc_feature (849)..(849): n is a, c, g, or t
  misc_feature (862)..(862): n is a, c, g, or t
  misc_feature (871)..(871): n is a, c, g, or t
  misc_feature (908)..(908): n is a, c, g, or t
  misc_feature (930)..(930): n is a, c, g, or t
  misc_feature (932)..(932): n is a, c, g, or t
  misc_feature (993)..(993): n is a, c, g, or t
  misc_feature (1007)..(1008): n is a, c, g, or t
  misc_feature (1011)..(1011): n is a, c, g, or t
  misc_feature (1013)..(1013): n is a, c, g, or t
  misc_feature (1034)..(1035): n is a, c, g, or t
  misc_feature (1051)..(1051): n is a, c, g, or t
  misc_feature (1056)..(1056): n is a, c, g, or t
  misc_feature (1060)..(1060): n is a, c, g, or t
  misc_feature (1066)..(1066): n is a, c, g, or t
  misc_feature (1072)..(1072): n is a, c, g, or t
ggcaagatggcggcgcaacagcgggactgcgggggtgctgcgcagctggcggggccggcggcggaggctgaccccctaggacgcttcacgtgtcccgtgtgcttagaggtgtacgagaagccggtacaggtgccctgcggacacgtcttttgctctgcatgcctgcaggaatgtctgaagccgaagaagcctgtctgtggggtgtgtcgcagcgctctggcacctggcgtccgagccgtggagctcgagcggcagatcgagagcacagagacttcttgccatggctgccgtaagaatttcttcctgtccaagatccggtcccacgtggctacttgttccaaataccagaattacatcatggaaggtgtgaaggccaccattaaggatgcatctcttcagccaaggaatgttccaaaccgttacacctttccttgtccttactgtcctgagaagaactttgatcaggaaggacttgtggaacactgcaaattattccatagcacggataccaaatctgtggtttgtccgatatgtgcctcgatgccctggggagaccccaactaccgcagcgccaacttcagagagcacatccagcgccggcaccggttttcttatgacacttttgtggattatgatgttgatgaagaggacatgatgaatcaggtgttgcagcgctccatcatcgaccagtgagcagagtccgtgcttgctatctgtctcatgttacagagcttccattacatattaaacgtgaaatctatgactcctgtaccttacctgttcaacagacctgaaaatgagccatggcattgggacagggtcacttctgacaggggaaattgggtcccnaggtcagcccttnctcttcccntttgggctcttgccaaagctgtcttcccctactggtnaaccttgtttgtcccacggtcnanttcgaatgggttctctgctacttcctggaacttctgccgcctcctggggaaaaaaatctancttccccccctctnnttncnactcattcctcccatccaggnntttttttttcgggtcnttcanccanccagancttttnggggtcagaaaaacca

SEQ ID NO: 564 - DNA, 623 bp, Homo sapiens
ggggggctgcagctgccggacccaggcgcgatggctacgggcgcggatgtacgggacattctagaactcgggggtccagaaggggatgcagcctctgggaccatcagcaagaaggacattatcaacccggacaagaaaaaatccaagaagtcctctgagacactgactttcaagaggcccgagggcatgcaccgggaagtctatgccttgctctactctgacaagaaggatgcacccccactgctacccagtgacactggccagggataccgtacagtgaaggccaagttgggctccaagaaggtgcggccttggaagtggatgccattcaccaacccggcccgcaaggacggagcaatgttcttccactggcgacgtgcagcggaggagggcaaggactacccctttgccaggttcaataagactgtgcaggtgcctgtgtactcggagcaggagtaccagctttatctccacgatgatgcttggactaaggcagaaacctgaccacctctttgacctcagccgccgctttgacctgcgttttgttgttatccatgaccggtatgaccaccagcagttcaagaagcgttctgtggaagacctgaaggagcggtactaccaca

SEQ ID NO: 565 - DNA, 1090 bp, Homo sapiens
  misc_feature (630)..(630): n is a, c, g, or t
  misc_feature (713)..(713): n is a, c, g, or t
  misc_feature (722)..(722): n is a, c, g, or t
  misc_feature (724)..(724): n is a, c, g, or t
  misc_feature (732)..(732): n is a, c, g, or t
  misc_feature (753)..(753): n is a, c, g, or t
  misc_feature (760)..(760): n is a, c, g, or t
  misc_feature (768)..(768): n is a, c, g, or t
  misc_feature (794)..(794): n is a, c, g, or t
  misc_feature (828)..(828): n is a, c, g, or t
  misc_feature (830)..(830): n is a, c, g, or t
  misc_feature (834)..(834): n is a, c, g, or t
  misc_feature (850)..(851): n is a, c, g, or t
  misc_feature (854)..(854): n is a, c, g, or t
  misc_feature (893)..(893): n is a, c, g, or t
  misc_feature (913)..(913): n is a, c, g, or t
  misc_feature (915)..(915): n is a, c, g, or t
  misc_feature (917)..(917): n is a, c, g, or t
  misc_feature (919)..(920): n is a, c, g, or t
  misc_feature (929)..(929): n is a, c, g, or t
  misc_feature (932)..(932): n is a, c, g, or t
  misc_feature (934)..(935): n is a, c, g, or t
  misc_feature (953)..(953): n is a, c, g, or t
  misc_feature (958)..(958): n is a, c, g, or t
  misc_feature (967)..(967): n is a, c, g, or t
  misc_feature (973)..(973): n is a, c, g, or t
  misc_feature (980)..(980): n is a, c, g, or t
  misc_feature (1000)..(1001): n is a, c, g, or t
  misc_feature (1010)..(1010): n is a, c, g, or t
  misc_feature (1013)..(1014): n is a, c, g, or t
  misc_feature (1017)..(1017): n is a, c, g, or t
  misc_feature (1029)..(1030): n is a, c, g, or t
  misc_feature (1037)..(1037): n is a, c, g, or t
  misc_feature (1054)..(1054): n is a, c, g, or t
  misc_feature (1064)..(1064): n is a, c, g, or t
  misc_feature (1074)..(1074): n is a, c, g, or t
  misc_feature (1078)..(1078): n is a, c, g, or t
  misc_feature (1084)..(1084): n is a, c, g, or t
  misc_feature (1089)..(1089): n is a, c, g, or t
gcggacgcgtgggctgctgcgcgcgtcggagaggctcctgggaaactcccacggcccagggactttcgaaagcagagcgaggagccctcgcacgcgctagtctgcgagtgagcgctcagcccggcacctgttcctccagcgccgccgccttcccacccctcggacccgcgccgctcgcggcgcccgcccgttcctgcgatgaatccggccctaggcaaccagacggacgtggcgggcctgttcctggccaacagcagcgaggcgctggagcgagccgtgcgctgctgcacccaggcgtccgtggtgaccgacgacggcttcgcggagggaggcccggacgagcgtagcctgtacataatgcgcgtggtgcagatcgcggtcatgtgcgtgctctcactcaccgtggtcttcggcatcttcttcctcggctgcaatctgctcatcaagtccgagggcatgatcaacttcctcgtgaaggaccggaggccgtctaaggaggtggaggcggtggtcgtggggccctactgacccgccctctgcccccgcggcaaccgctcccacgcctgcccactttgctagcccggctgtgcccctcactatcagagactgggcgaagcaaacctgtcggantcaattatttctctcgacttcggcctttcggaaagaagcgaccggtttctccctcgccctctgaaagtcctcatgcctggcantcggaaganancgcccaanactctgaactcaaccaaaaantggcaanaaaaaggncgattaaggcgcaaaacttttggaanctgctacttacttggaaatgcggggaaaaccaangntgcnaaaggccctttttccnnccncaaggtgggccaaacttttgggggcaagttgaaaaaggncgggcaagggaaaaaaaccnancngnnacttgattnccntnngaacggaaaaaatgaacntgttnaaaaacccncccaanaaaaatnttggggtttcaaaaaatccnngttcggggnggnnttnccaatttttttnnttgtttncccccttggcctggaangggaaggggnaaaaaaaacntttnaatttnaaacng

SEQ ID NO: 566 - DNA, 439 bp, Homo sapiens
  misc_feature (14)..(14): n is a, c, g, or t
  misc_feature (19)..(19): n is a, c, g, or t
  misc_feature (45)..(45): n is a, c, g, or t
  misc_feature (52)..(52): n is a, c, g, or t
  misc_feature (71)..(71): n is a, c, g, or t
  misc_feature (84)..(84): n is a, c, g, or t
  misc_feature (91)..(91): n is a, c, g, or t
  misc_feature (139)..(139): n is a, c, g, or t
  misc_feature (164)..(164): n is a, c, g, or t
  misc_feature (227)..(229): n is a, c, g, or t
  misc_feature (240)..(240): n is a, c, g, or t
  misc_feature (265)..(265): n is a, c, g, or t
  misc_feature (282)..(282): n is a, c, g, or t
  misc_feature (289)..(289): n is a, c, g, or t
  misc_feature (294)..(294): n is a, c, g, or t
  misc_feature (306)..(306): n is a, c, g, or t
  misc_feature (316)..(316): n is a, c, g, or t
  misc_feature (320)..(321): n is a, c, g, or t
  misc_feature (323)..(323): n is a, c, g, or t
  misc_feature (325)..(327): n is a, c, g, or t
  misc_feature (334)..(335): n is a, c, g, or t
  misc_feature (342)..(343): n is a, c, g, or t
  misc_feature (349)..(349): n is a, c, g, or t
  misc_feature (356)..(356): n is a, c, g, or t
  misc_feature (373)..(374): n is a, c, g, or t
  misc_feature (406)..(406): n is a, c, g, or t
  misc_feature (419)..(419): n is a, c, g, or t
  misc_feature (424)..(425): n is a, c, g, or t
  misc_feature (437)..(438): n is a, c, g, or t
gcggacgcgtgggnctgcngctgcatgcggttgctgctctccggnctcgtcntctgcgccgccctgcgtgnagccgccgccggncacccgnatgtagccgcctgtcccgggagcctggactgtgacctgaaaaggcggncaaggtgtcctcctggtgcacatgncagtgggccctgccttcagcccttccaggaggaccagcaagggctctgtgtgcccaggatgcnnnggcctccatgngggggccggccccagcccaaactgnaagatgagattgacttnctggacnaggancttgcccggaangagtctgganactnnantnnncccctanncaagganngacagnggctccnggagcctgccaccctgnncttctcggcacgggggcaggggctggagctgnacctcccctccantccanngaacccccacgnnc

SEQ ID NO: 567 - DNA, 1088 bp, Homo sapiens
  misc_feature (792)..(792): n is a, c, g, or t
  misc_feature (824)..(824): n is a, c, g, or t
  misc_feature (853)..(853): n is a, c, g, or t
  misc_feature (855)..(855): n is a, c, g, or t
  misc_feature (859)..(859): n is a, c, g, or t
  misc_feature (876)..(876): n is a, c, g, or t
  misc_feature (884)..(884): n is a, c, g, or t
  misc_feature (896)..(897): n is a, c, g, or t
  misc_feature (909)..(909): n is a, c, g, or t
  misc_feature (921)..(921): n is a, c, g, or t
  misc_feature (924)..(924): n is a, c, g, or t
  misc_feature (941)..(941): n is a, c, g, or t
  misc_feature (946)..(949): n is a, c, g, or t
  misc_feature (960)..(960): n is a, c, g, or t
  misc_feature (963)..(964): n is a, c, g, or t
  misc_feature (967)..(967): n is a, c, g, or t
  misc_feature (976)..(976): n is a, c, g, or t
  misc_feature (988)..(988): n is a, c, g, or t
  misc_feature (1002)..(1002): n is a, c, g, or t
  misc_feature (1011)..(1011): n is a, c, g, or t
  misc_feature (1013)..(1013): n is a, c, g, or t
  misc_feature (1042)..(1042): n is a, c, g, or t
  misc_feature (1067)..(1067): n is a, c, g, or t
  misc_feature (1069)..(1069): n is a, c, g, or t
  misc_feature (1071)..(1071): n is a, c, g, or t
  misc_feature (1075)..(1075): n is a, c, g, or t
  misc_feature (1079)..(1079): n is a, c, g, or t
  misc_feature (1085)..(1085): n is a, c, g, or t
ggcctgagcctgagcctgagcccgagccgggagccggtcgcgggggctccgggctgtgggaccgctgggcccccagcgatggcgaccctgtggggaggccttcttcggcttggctccttgctcagcctgtcgtgcctggcgctttccgtgctgctgctggcgcagctgtcagacgccgccaagaatttcgaggatgtcagatgtaaatgtatctgccctccctataaagaaaattctgggcatatttataataagaacatatctcagaaagattgtgattgccttcatgtcgtggagcccatgcctgtgcgggggcctgatgtagaagcatactgtctacgctgtgaatgcaaatatgaagaaagaagctctgtcacaatcaaggttaccattataatttatctctccattttgggccttctacttctgtacatggtatatcttactctggttgagcccatactgaagaggcgcctctttggacatgcacagttgatacagagtgatgatgatattggggatcaccagccttttgcaaatgcacacgatgtgctagcccgctcccgcagtcgagccaacgtgctgaacaaggtagaatatgcacagcagcgctggaagcttcaagtccaagagcagcgaaagtctgtctttgaccggcatgttgtcctcagctaattgggaattgaattcaaggtgactagaaagaaacaggcagacaactggaaagaactgactgggttttgctgggtttcattttaataccttgttgatttcaccaactgttgctggaanaatcaaaactggaagcaaaaaacttgcttgantttttttttcttgttaacgtaataaaaananaaantttttaaaagcccacanctcaaagncagcccaaaaannccttttccctantttgggactttnacnaaaaaaaaaaaaaatcntgccnnnnaaattatcttngannccntttacctgnaaaaagcccctnctttttttcccccnaaaattttnancttgactttcaaaaaaaattttccggggnttttgggggggggtggttttttggntngnttgntttngggggnaaa

SEQ ID NO: 568 - DNA, 1098 bp, Homo sapiens
  misc_feature (785)..(785): n is a, c, g, or t
  misc_feature (798)..(798): n is a, c, g, or t
  misc_feature (805)..(805): n is a, c, g, or t
  misc_feature (856)..(856): n is a, c, g, or t
  misc_feature (925)..(925): n is a, c, g, or t
  misc_feature (938)..(938): n is a, c, g, or t
  misc_feature (944)..(944): n is a, c, g, or t
  misc_feature (951)..(951): n is a, c, g, or t
  misc_feature (955)..(955): n is a, c, g, or t
  misc_feature (957)..(957): n is a, c, g, or t
  misc_feature (966)..(966): n is a, c, g, or t
  misc_feature (981)..(981): n is a, c, g, or t
  misc_feature (990)..(990): n is a, c, g, or t
  misc_feature (994)..(994): n is a, c, g, or t
  misc_feature (1026)..(1026): n is a, c, g, or t
  misc_feature (1032)..(1032): n is a, c, g, or t
  misc_feature (1034)..(1034): n is a, c, g, or t
  misc_feature (1037)..(1037): n is a, c, g, or t
  misc_feature (1043)..(1043): n is a, c, g, or t
  misc_feature (1046)..(1046): n is a, c, g, or t
  misc_feature (1051)..(1051): n is a, c, g, or t
  misc_feature (1058)..(1058): n is a, c, g, or t
  misc_feature (1060)..(1060): n is a, c, g, or t
  misc_feature (1064)..(1065): n is a, c, g, or t
  misc_feature (1067)..(1067): n is a, c, g, or t
  misc_feature (1084)..(1084): n is a, c, g, or t
  misc_feature (1088)..(1088): n is a, c, g, or t
  misc_feature (1097)..(1097): n is a, c, g, or t
gggcaagcagaagtgacccgtctcttgctggagggaatcagtagcactcacgtgaaccacctgcgctgcctccacgagttcgtcaagtctcagacaacctactacgcacagtgctaccgccacatgctggacttgcagaagcagctgggcagatttcccggcaccttcgtgggcaccacagagcccgcctccccacccctgagcagcacctcacccaccactgctgcggccactatgcctgtggtgccctctgtggccagcctggcccctccgggggaggcctcgctctgcctggaagaggtggccccccctgccagtgggacccgcaaagctcgggtgctctatgactacgaggcagccgacagcagtgagctggccctgctggctgatgagctcatcactgtctacagcctgcctggcatggaccctgactggctcattggcgagagaggcaacaagaagggcaaggtccctgtcacctacttggaactgctcagctaggcaggtgcccccatcccccccgcattctggcctaggcaggagaggatgggcgcagccctgccacttaacttgtttgttggtgacacagttgttcagagtggggagaattcaccccattctgtccctgcccctagtcacctagctgtgagggtgcctgaggctgaatggctccacccctcccccagccctgcttctgacctgtggctctggagcccctgcccctgcctgcatccccgagcaccccaccctccaggctccactaaggagggaggggctgtctgcancagctgcactcancacctangccagggtggggccgccgcaaatgggctcaggaaaccccaggtgcactcancgagagccctgcctttcagttgccaaaagctgcatcaggggaatgcggcaaggcacaaagggctctggnaacccctggggantgggcnctgcccntggnangggaaaacntggccaaggctggtnttgggcccngaanaacattttcgggggtatcctcccctccacccntcaaantnaancaaatncanggccnttcccanangganncnaataaacttaataactnactnggaatcctnt

SEQ ID NO: 569 - DNA, 966 bp, Homo sapiens
  misc_feature (675)..(675): n is a, c, g, or t
  misc_feature (692)..(692): n is a, c, g, or t
  misc_feature (768)..(768): n is a, c, g, or t
  misc_feature (776)..(776): n is a, c, g, or t
  misc_feature (791)..(791): n is a, c, g, or t
  misc_feature (809)..(809): n is a, c, g, or t
  misc_feature (811)..(811): n is a, c, g, or t
  misc_feature (817)..(817): n is a, c, g, or t
  misc_feature (829)..(829): n is a, c, g, or t
  misc_feature (831)..(831): n is a, c, g, or t
  misc_feature (861)..(861): n is a, c, g, or t
  misc_feature (865)..(865): n is a, c, g, or t
  misc_feature (883)..(883): n is a, c, g, or t
  misc_feature (902)..(902): n is a, c, g, or t
  misc_feature (925)..(926): n is a, c, g, or t
  misc_feature (933)..(933): n is a, c, g, or t
  misc_feature (955)..(955): n is a, c, g, or t
  misc_feature (963)..(963): n is a, c, g, or t
gtgcatactgacgccaaaatccgtgctgaaaatggaacagggtccagccctcggggtcctggctgcagcctccggcactttgcctgcgaacagaacctgctgtcgcggccagatggctctgcttccttcctgcaaggtgacacctctgtcctggcgggtgtgtacgggccggccgaggtgaaggtcagcaaagagattttcaacaaggccacactcgaagtgatcctgaggccgaagattgggctgcctggtgttgcagagaagagccgggagcggctgatcaggaacacgtgcgaggcggtggtgctgggcacgttgcacccccgcacctccatcaccgtggtgctgcaggttgtcagcgatgccggctctctcctggcctgttgtctgaatgccgcctgcatggcattggtggatgcaggtgtgcccatgcgggctctcttctgtggggtcgcctgcgccctggactctgatgggaccctcgtgctggatcctacatccaagcaagaaaaggaggcccgggcagtcctgacctttgccctggacagcgtggaacggaagctgctgatgtccagcaccaaggggctctactcagacactgagctccagcagtgcctggctgcggcccaggccgcttcgcaacacgtcttccgtttctaccgggaatcgctgcanaggcgttactccaaganctgaagcaagctggggcaaaggggccgctcccattgcctccacccactcaccccctaaagcctgaaaccaaaccancagcccanccttgcctctctgancccatgggctccttgaancntgcaanctctgtaaccananggctcctgtggggaaggccttgggcctgtnacancccccaggcctgggggcnaaaaatccccccaacaagnaaaaaatttcaaaagaaactccnnatttatngaaaaggaagaaatcaaaaaantatttccnttt

SEQ ID NO: 570 - DNA, 1079 bp, Homo sapiens
  misc_feature (726)..(726): n is a, c, g, or t
  misc_feature (741)..(741): n is a, c, g, or t
  misc_feature (803)..(803): n is a, c, g, or t
  misc_feature (816)..(816): n is a, c, g, or t
  misc_feature (890)..(890): n is a, c, g, or t
  misc_feature (900)..(900): n is a, c, g, or t
  misc_feature (908)..(909): n is a, c, g, or t
  misc_feature (918)..(918): n is a, c, g, or t
  misc_feature (921)..(921): n is a, c, g, or t
  misc_feature (941)..(941): n is a, c, g, or t
  misc_feature (946)..(946): n is a, c, g, or t
  misc_feature (952)..(952): n is a, c, g, or t
  misc_feature (956)..(956): n is a, c, g, or t
  misc_feature (960)..(960): n is a, c, g, or t
  misc_feature (963)..(963): n is a, c, g, or t
  misc_feature (968)..(968): n is a, c, g, or t
  misc_feature (971)..(971): n is a, c, g, or t
  misc_feature (992)..(992): n is a, c, g, or t
  misc_feature (1005)..(1005): n is a, c, g, or t
  misc_feature (1009)..(1009): n is a, c, g, or t
  misc_feature (1020)..(1020): n is a, c, g, or t
  misc_feature (1024)..(1024): n is a, c, g, or t
  misc_feature (1027)..(1027): n is a, c, g, or t
  misc_feature (1033)..(1033): n is a, c, g, or t
  misc_feature (1062)..(1062): n is a, c, g, or t
  misc_feature (1066)..(1067): n is a, c, g, or t
  misc_feature (1070)..(1070): n is a, c, g, or t
  misc_feature (1072)..(1072): n is a, c, g, or t
  misc_feature (1075)..(1075): n is a, c, g, or t
  misc_feature (1078)..(1078): n is a, c, g, or t
gaggccatccaggtgctgcggttccacctgctggagctggagaaggtccacgacctgtgcgacaacttctgtcaccgctacatcacctgcctcaagggaaagatgcccatcgacctggtcatcgaggatcgggacggcggctgcagggaggacttcgaggactacccagcctcctgccccagcctcccagaccagaataatatgtggattcgagaccatgaggatagtgggtctgtacatttggggaccccaggtccatccagtgggggcctggcctcccagagtggggacaactccagtgaccaaggagacgggctggacaccagcgtggcctctcccagttctggtggagaagatgaggacttggaccaggagcgacggcgaaacaagaagagggggatcttccccaaggtggccaccaacatcatgcgagcctggttgttccagcacctctcgcacccgtacccctcggaggagcagaagaaacagctggcgcaggacacggggctcaccatcctgcaagtcaacaactggttcattaacgcccggagacgcatcgtgcaacctatgatcgatcaatccaaccgcacagggcagggtgcagccttcagcccagagggccagcccatcgggggctataccgagacgcagccacacgtggccgtccggcctccgggatcagtggggatgagtttgaacttggaaggagaatggcattatctatanaggctgatgcagganagacccagcctccggctgtgacccccagccttcacacctgcctctggttcccgccctggtcntccagcttcaggnaccccacctccaaaggccccctctgctcaatgcctacctccctaagggccctgctgggacatgggggcctgaantgcccatccnaagggctnntcaaggacnccnggcaagggcttccaggcccntgaanccccantttntgcnttnacctntgnctgggaaacccaaacttgggnctcttgggccttnggtnccccaaaaaangggnggntaaggnccttccccccccagaaaaaaaaaggaacngggnnggntnggncant

SEQ ID NO: 571 - DNA, 1147 bp, Homo sapiens
  misc_feature (837)..(837): n is a, c, g, or t
  misc_feature (839)..(839): n is a, c, g, or t
  misc_feature (885)..(885): n is a, c, g, or t
  misc_feature (898)..(898): n is a, c, g, or t
  misc_feature (920)..(920): n is a, c, g, or t
  misc_feature (932)..(932): n is a, c, g, or t
  misc_feature (965)..(965): n is a, c, g, or t
  misc_feature (974)..(974): n is a, c, g, or t
  misc_feature (980)..(981): n is a, c, g, or t
  misc_feature (987)..(987): n is a, c, g, or t
  misc_feature (999)..(999): n is a, c, g, or t
  misc_feature (1011)..(1011): n is a, c, g, or t
  misc_feature (1014)..(1014): n is a, c, g, or t
  misc_feature (1027)..(1027): n is a, c, g, or t
  misc_feature (1029)..(1029): n is a, c, g, or t
  misc_feature (1054)..(1054): n is a, c, g, or t
  misc_feature (1063)..(1063): n is a, c, g, or t
  misc_feature (1069)..(1069): n is a, c, g, or t
  misc_feature (1075)..(1075): n is a, c, g, or t
  misc_feature (1080)..(1080): n is a, c, g, or t
  misc_feature (1082)..(1082): n is a, c, g, or t
  misc_feature (1092)..(1093): n is a, c, g, or t
  misc_feature (1095)..(1095): n is a, c, g, or t
  misc_feature (1100)..(1100): n is a, c, g, or t
  misc_feature (1119)..(1120): n is a, c, g, or t
  misc_feature (1129)..(1129): n is a, c, g, or t
  misc_feature (1135)..(1135): n is a, c, g, or t
  misc_feature (1137)..(1137): n is a, c, g, or t
  misc_feature (1139)..(1139): n is a, c, g, or t
  misc_feature (1141)..(1142): n is a, c, g, or t
  misc_feature (1147)..(1147): n is a, c, g, or t
gttcccactctggagtatggattcctcgttcagatcatgaagtatgcagaacagaggattccaacattgaatgagtactgtgtggtgtgtgatgagcagcatgtcttccaaaatggatctatgctgaagccagctgtctgtactcgtgaactatgcgttttctccttctacacactgggcgtcatgtctggagctgcagaggaggtggccactggagcagaggtggtggatctgctggtggccatgtgtagggcagctttagagtcccctagaaagagcatcatctttgagccttatccctctgtggtggaccccactgatcccaagactctggcctttaaccctaagaagaagaattatgagcggcttcagaaagctctggatagtgtgatgtctattcgggagatgacccagggctcatatttggaaatcaagaaacagatggacaagttggatcccctggcccatcctctcctgcagtggatcatctctagcaacaggtcacacattgtcaaactacctctcagcaggctgaagttcatgcacacctcacaccagttcctcctgctgagcagccctcctgccaaggaggctcggttccggaccgccaagaagctctatggcagcacctttgccttccatgggtcccacattgagaactggcattcgatcctgcgcaatgggctggtcaatgcatcctacaccaaactgcagctgcatggagcagcctatggcaaaggcatctacctgagccccatctccagtatttcctttgggatactcaggaatgggaaaaggacagcacaggatgcccctcccaaggatgagctggtccananatacaacaggatgaataccatcccccaaacccgatccattcagtcncggttccctgcanagtcggaatctaaactgtatancactttgggaantgattacatctaaggacctccaaaacatgggancatctgggngggccnnggtccnacatgtctgccnaaattctttttnttnttgaagatggccngngggccaagccaccttaatactccgnaccccaaanacaaangaaatnggcgngngatcgaactnngnttacnaacggggggcccccccccnnacccccggntccccnancntnnccccn

SEQ ID NO: 572 - DNA, 1085 bp, Homo sapiens
  misc_feature (195)..(195): n is a, c, g, or t
  misc_feature (690)..(690): n is a, c, g, or t
  misc_feature (794)..(794): n is a, c, g, or t
  misc_feature (817)..(817): n is a, c, g, or t
  misc_feature (820)..(820): n is a, c, g, or t
  misc_feature (848)..(848): n is a, c, g, or t
  misc_feature (854)..(854): n is a, c, g, or t
  misc_feature (858)..(858): n is a, c, g, or t
  misc_feature (861)..(861): n is a, c, g, or t
  misc_feature (884)..(884): n is a, c, g, or t
  misc_feature (898)..(898): n is a, c, g, or t
  misc_feature (912)..(912): n is a, c, g, or t
  misc_feature (916)..(916): n is a, c, g, or t
  misc_feature (921)..(921): n is a, c, g, or t
  misc_feature (930)..(930): n is a, c, g, or t
  misc_feature (942)..(942): n is a, c, g, or t
  misc_feature (960)..(960): n is a, c, g, or t
  misc_feature (967)..(967): n is a, c, g, or t
  misc_feature (978)..(978): n is a, c, g, or t
  misc_feature (980)..(980): n is a, c, g, or t
  misc_feature (985)..(985): n is a, c, g, or t
  misc_feature (989)..(990): n is a, c, g, or t
  misc_feature (999)..(999): n is a, c, g, or t
  misc_feature (1007)..(1007): n is a, c, g, or t
  misc_feature (1016)..(1016): n is a, c, g, or t
  misc_feature (1018)..(1018): n is a, c, g, or t
  misc_feature (1023)..(1023): n is a, c, g, or t
  misc_feature (1029)..(1029): n is a, c, g, or t
  misc_feature (1032)..(1032): n is a, c, g, or t
  misc_feature (1034)..(1034): n is a, c, g, or t
  misc_feature (1046)..(1046): n is a, c, g, or t
  misc_feature (1051)..(1051): n is a, c, g, or t
  misc_feature (1057)..(1057): n is a, c, g, or t
  misc_feature (1071)..(1072): n is a, c, g, or t
  misc_feature (1076)..(1076): n is a, c, g, or t
  misc_feature (1079)..(1079): n is a, c, g, or t
  misc_feature (1081)..(1081): n is a, c, g, or t
gcccacgcgtccggctccacggagcacgccctgtgcgggaagccagaccagatcgagggctcgctggcggccttcctgcccgacctgtccctggccaagaggaagacctggcggaacccttggcggcgttcctaccacaagcgcaagaaggccgagtgggaggtggaccctgactactgcgaggaggtgaagcanacaccgccctacgacagcagccaccgcatcctggacgtcatggacatgacgatcttcgacttcctcatgggaaacatggaccgtcaccactacgagacttttgagaagtttgggaatgaaacgttcatcatccacttagacaatggaagagggtttgggaagtattcgcacgacgagctctccatcctggtgccgctacagcagtgctgcaggatccggaagtccacctacctgcgtctgcagctcctggccaaggaggagtacaagctgagcctgctgatggccgagtctctgcggggggaccaggtggcacccgtgctgtaccagccgcacctggaggccctggaccggcggctccgcgtcgttctaaaggccgtccgggactgcgtggagagggacgggctccacagcgtggtggatgacgacctggacactgagcacagagccgcctcggcgaggtagtgtccgccggccgctgcgctgcccgggacaganacagaggggccggacctcccagcaagcgcatgcgcccgtcgtgaattcagtgaattcagaggcaggacgggatcatccggagtcgggagctgctgccacaggangcgaggctccccaggtctcatanganacattttgtcagtgtttgaccaaaaaancttggnaagnaancgctgtctgtgctcacgaaaaangcggccggcgccgnaggcatttcattcntttntgtanggaaaggancctttatttacnatttggatttaatttgangaaaaantatataaaccnanaactntacnnaaatgccantccctacnaaccaaccnangaacnccctcntgntntgggggcccctnaggcnaactcncccccaggtttccnntcgnacnanttaa

SEQ ID NO: 573 - DNA, 1062 bp, Homo sapiens
  misc_feature (717)..(717): n is a, c, g, or t
  misc_feature (742)..(742): n is a, c, g, or t
  misc_feature (818)..(818): n is a, c, g, or t
  misc_feature (831)..(831): n is a, c, g, or t
  misc_feature (838)..(838): n is a, c, g, or t
  misc_feature (840)..(840): n is a, c, g, or t
  misc_feature (859)..(859): n is a, c, g, or t
  misc_feature (875)..(876): n is a, c, g, or t
  misc_feature (878)..(878): n is a, c, g, or t
  misc_feature (882)..(882): n is a, c, g, or t
  misc_feature (887)..(887): n is a, c, g, or t
  misc_feature (906)..(906): n is a, c, g, or t
  misc_feature (913)..(913): n is a, c, g, or t
  misc_feature (915)..(915): n is a, c, g, or t
  misc_feature (918)..(918): n is a, c, g, or t
  misc_feature (938)..(938): n is a, c, g, or t
  misc_feature (943)..(943): n is a, c, g, or t
  misc_feature (960)..(960): n is a, c, g, or t
  misc_feature (962)..(962): n is a, c, g, or t
  misc_feature (969)..(969): n is a, c, g, or t
  misc_feature (973)..(973): n is a, c, g, or t
  misc_feature (977)..(977): n is a, c, g, or t
  misc_feature (981)..(981): n is a, c, g, or t
  misc_feature (988)..(989): n is a, c, g, or t
  misc_feature (992)..(992): n is a, c, g, or t
  misc_feature (1006)..(1006): n is a, c, g, or t
  misc_feature (1028)..(1028): n is a, c, g, or t
  misc_feature (1039)..(1039): n is a, c, g, or t
  misc_feature (1046)..(1046): n is a, c, g, or t
  misc_feature (1048)..(1048): n is a, c, g, or t
  misc_feature (1053)..(1053): n is a, c, g, or t
  misc_feature (1060)..(1060): n is a, c, g, or t
gggctgccgccgtcgctgctgccggtgcaggggaaccccagtccccggacgaattgctcccgaaaggcgacgcggagaagcctgaggaggagctggaggaggacgacgatgaggagctagatgagaccctgtcggagagactatggggcctgacggagatgtttccggagagggtccggtccgcggccggagccacttttgatctttccctctttgtggctcagaaaatgtacaggttttccagggcagccttgtggattgggaccacttcctttatgatcctggttcttcccgttgtctttgagacggagaagttgcaaatggagcaacagcagcaactgcagcagcggcagatacttctaggacctaacacagggctctcaggaggaatgccaggggctctaccctcacttcctggaaagatctagattgttattgctgtttgagctgtctcagtgggataagtttgaaattcaagtgtttgaactgctgataatttggattttttttttttttttaactttggcacattgatctatctaaacctggtggggagaattatccccacattgtctcatggaaagactcaacttgcaactgtgccctccacactatccttacttctgtctccactctgataccagagtgcagccatgcagatggttattccagctctggtcacccgactcctttcaccaaattgctcctaactggaanatctcactttccccttgtggggtangaaccgatgcccagtgggagggatgtgcccctgaccattaacgactgttttttttttttttttttaaaaaatgganttgttggggcagnacatgcncncaatgtgaaacaaaaaaantgcattacccctgtanngnaagnggccnctatgaatccctatgtatnaaaagangnagncaggcttgccccttcccccnaaaanggggactatggaaaaancnggagctntttncccngcanatttggnngtnaaaccggggggggnttaaaaaaaaaaaaaccgggcnccctttttgtntttaaantnaaaangatcccncg

SEQ ID NO: 574 - DNA, 1093 bp, Homo sapiens
  misc_feature (711)..(711): n is a, c, g, or t
  misc_feature (721)..(721): n is a, c, g, or t
  misc_feature (764)..(764): n is a, c, g, or t
  misc_feature (844)..(844): n is a, c, g, or t
  misc_feature (849)..(849): n is a, c, g, or t
  misc_feature (858)..(858): n is a, c, g, or t
  misc_feature (885)..(885): n is a, c, g, or t
  misc_feature (895)..(895): n is a, c, g, or t
  misc_feature (899)..(899): n is a, c, g, or t
  misc_feature (915)..(915): n is a, c, g, or t
  misc_feature (921)..(921): n is a, c, g, or t
  misc_feature (940)..(940): n is a, c, g, or t
  misc_feature (944)..(944): n is a, c, g, or t
  misc_feature (952)..(952): n is a, c, g, or t
  misc_feature (956)..(956): n is a, c, g, or t
  misc_feature (959)..(959): n is a, c, g, or t
  misc_feature (961)..(961): n is a, c, g, or t
  misc_feature (972)..(972): n is a, c, g, or t
  misc_feature (990)..(990): n is a, c, g, or t
  misc_feature (996)..(996): n is a, c, g, or t
  misc_feature (998)..(998): n is a, c, g, or t
  misc_feature (1007)..(1007): n is a, c, g, or t
  misc_feature (1010)..(1010): n is a, c, g, or t
  misc_feature (1023)..(1023): n is a, c, g, or t
  misc_feature (1025)..(1026): n is a, c, g, or t
  misc_feature (1050)..(1050): n is a, c, g, or t
  misc_feature (1059)..(1059): n is a, c, g, or t
  misc_feature (1062)..(1062): n is a, c, g, or t
  misc_feature (1071)..(1071): n is a, c, g, or t
  misc_feature (1074)..(1075): n is a, c, g, or t
  misc_feature (1084)..(1085): n is a, c, g, or t
  misc_feature (1092)..(1092): n is a, c, g, or t
gggggcatgcagtttggtcttctgggaactggcttccagctgtttggctatgaggaaaaactgcagtccaatcctctacagcatctctttgaagtttatgtacaagttaataaagaagcagcagatgataaaagtgtagcaaaagcagcacaggagttcttccaacgattggaactgggcgatgtgcaagcactttcactgtggcaaaaatttcgggacttgagcattgaagagtacattcgggtttacaagcgtctgggagtatattttgatgaatattcaggagaatcattttatcgtgaaaaatctcaagaggtcttaaagttgctggagagtaaaggactcctactgaaaacaataaaaggaacggctgtagtagatctctctgggaatggcgacccctcctcaatttgtactgtaatgcgaagtgatgggacttctctctatgcaaccagagatcttgcagctgctatagatcgaatggacaagtataattttgatacaatgatatatgtgacagataaaggacaaaaaaagcattttcagcaagtattccaaatgctgaagatcatgggatatgactgggcagaaaggtgccagcacgtgccctttggagtagtacagggaatgaagactcgaagaggagatgtcactttcctggaagatgttttaaatgagattcaattaaggatgctacagaacatggcttcnattaagacanctaaagaactcaagaacccacaagagactgcagaaaagggtcnggctcgcagcactcattattcaggacttcaaaggtttactcttatctgactacaagttcagctgggatcgtgttttccanagtcncgggggacncaggagtcttcctacagtacacacacncccgcctccncagnttggaaagaaactttnggatgngggtacctgaatgacttcnaccncggcttgnttanaananccccaatctgntttcaattcttcaccacntccccngnttccacaanggngctttttaaatcntnncaggacttccaccccagcaaaccnccgttaccntcnaactttaanccnncttggcccnnggggccna

SEQ ID NO: 575 - DNA, 846 bp, Homo sapiens
gcgaaggaccaaaggcgaccggtgcaggtgcacgacgccagctcccttctggggggccggggcctgggggttgccatggcccccagccacctgtcagtgcgggagatgagggaagatgagaagcccctggtgctggagatgctgaaggccggcgtgaaggacacggaaaaccgcgtggccctccatgccttgacacggccgccggccctgctcctcctggcggcggccagcagcggcctgcgctttgtcctggcttccttcgccctggccctcctcctgccggtgttcctggctgtggccgccgtgaagctgggcctgcgggcccgatggggctcgctgcctccgccgggtggcctggggggcccctgggtggccgtgcggggctccggtgacgtgtgtggggtcctggctctggcccctggcacaaatgcaggggacggggcccgggtcacccgcctgtctgtctctcgctggcaccgccgccggggcgtgggcaggaggctgctggccttcgcggaggcccgggctcgggcctgggctgggggcatgggggagccccgggcccggctcgtggtccccgtggctgtggccgcctggggggtgggagggatgctggagggctgtggctaccaggccgaggggggctggggctgcctgggctacacgctggtgagggaattcagcaaagacctgtgaagctacagactgacagccagggcaggggaggagggaggggcgccagcacctgatgatcgcctactgtctgcgggttcttttacctgctctccctcagtgagtcctcaaccaccctgggcccagaaacagaggcctgcccgaggggaggag

SEQ ID NO: 576 - DNA, 1112 bp, Homo sapiens
  misc_feature (779)..(779): n is a, c, g, or t
  misc_feature (827)..(827): n is a, c, g, or t
  misc_feature (843)..(843): n is a, c, g, or t
  misc_feature (867)..(867): n is a, c, g, or t
  misc_feature (883)..(883): n is a, c, g, or t
  misc_feature (896)..(896): n is a, c, g, or t
  misc_feature (906)..(906): n is a, c, g, or t
  misc_feature (926)..(926): n is a, c, g, or t
  misc_feature (931)..(932): n is a, c, g, or t
  misc_feature (935)..(935): n is a, c, g, or t
  misc_feature (942)..(942): n is a, c, g, or t
  misc_feature (950)..(950): n is a, c, g, or t
  misc_feature (959)..(959): n is a, c, g, or t
  misc_feature (971)..(971): n is a, c, g, or t
  misc_feature (991)..(991): n is a, c, g, or t
  misc_feature (998)..(998): n is a, c, g, or t
  misc_feature (1009)..(1009): n is a, c, g, or t
  misc_feature (1015)..(1016): n is a, c, g, or t
  misc_feature (1019)..(1019): n is a, c, g, or t
  misc_feature (1026)..(1026): n is a, c, g, or t
  misc_feature (1036)..(1036): n is a, c, g, or t
  misc_feature (1039)..(1039): n is a, c, g, or t
  misc_feature (1050)..(1050): n is a, c, g, or t
  misc_feature (1068)..(1068): n is a, c, g, or t
  misc_feature (1078)..(1078): n is a, c, g, or t
  misc_feature (1084)..(1086): n is a, c, g, or t
  misc_feature (1093)..(1093): n is a, c, g, or t
  misc_feature (1095)..(1095): n is a, c, g, or t
  misc_feature (1097)..(1097): n is a, c, g, or t
  misc_feature (1107)..(1107): n is a, c, g, or t
  misc_feature (1112)..(1112): n is a, c, g, or t
gagcagggcctgcaagtttcattccaaaaagtgatgctgagaagatatgaaagatgttgtcttgagaaattacgcttaaggaatgactgggaaattgtgggtgagtggaaagggcagaaggcaagttataatggacttgacctatgctcagcaactactcatagcaaaaactttcaatgcaataaatgtgtgaaaggttttagtaaatttgcaaatctaaataaatgtaagataagccatactggagaaaaaccattcaaatgcaaagaatgtggcaatgtctcttgcatgtctttaataatgactcaacagcagagaatccatattggagagaacccgtaccaatgtaaaaaatgtggcaaagcctttaatgagtgctcatgctttactgactgtaagagaattcatgttggagagaaacattgcaaatgtgaagaatgtaataacatttttaagtcttgctcaagtcttgctgttgttgagaaaaatcatactgaaaagaaaacctacagatgtgaagaatgtggcaaagcttttaacctgtgctcagttcttactaaacataagaaaattcatactggagagaaaccatacaaatgtgaagaatgtggcaaatcctttaagttgttcccataccttactcaacacaagagaattcatagtagagagaaaccctacaagtgtgaagaatgtggcaaagtctttaaattgttgtcataccttactcaacatagaagaattcatactggagagaaaccttccgatgtgaagaatgtggnaaaggcctttaaccagagctcacatctgactgaacataggagaattcntactggtgagaaaccntacaaatgtgaggaatgtggcaanccttttacctggttcncataccttattcngcataaaaanaattcctactgggccaaaanccccnnacnaatgggnaggaatgnggccaaacnttttaccctggntttccctacccttaccccancaaaaanaaattcctacngggaannaanccccacnaatgggatgnaangggccaaaccntttaaccgggtttccaanccttaccaanccaaannnaaattcntncngggaaaaaanccccn

SEQ ID NO: 577 - DNA, 1101 bp, Homo sapiens
  misc_feature (761)..(761): n is a, c, g, or t
  misc_feature (775)..(775): n is a, c, g, or t
  misc_feature (799)..(799): n is a, c, g, or t
  misc_feature (807)..(807): n is a, c, g, or t
  misc_feature (815)..(815): n is a, c, g, or t
  misc_feature (821)..(821): n is a, c, g, or t
  misc_feature (837)..(837): n is a, c, g, or t
  misc_feature (839)..(840): n is a, c, g, or t
  misc_feature (844)..(844): n is a, c, g, or t
  misc_feature (881)..(881): n is a, c, g, or t
  misc_feature (885)..(885): n is a, c, g, or t
  misc_feature (891)..(891): n is a, c, g, or t
  misc_feature (903)..(903): n is a, c, g, or t
  misc_feature (917)..(917): n is a, c, g, or t
  misc_feature (932)..(932): n is a, c, g, or t
  misc_feature (940)..(941): n is a, c, g, or t
  misc_feature (954)..(954): n is a, c, g, or t
  misc_feature (957)..(958): n is a, c, g, or t
  misc_feature (972)..(972): n is a, c, g, or t
  misc_feature (990)..(990): n is a, c, g, or t
  misc_feature (995)..(995): n is a, c, g, or t
  misc_feature (1001)..(1001): n is a, c, g, or t
  misc_feature (1006)..(1006): n is a, c, g, or t
  misc_feature (1009)..(1009): n is a, c, g, or t
  misc_feature (1017)..(1018): n is a, c, g, or t
  misc_feature (1020)..(1020): n is a, c, g, or t
  misc_feature (1022)..(1023): n is a, c, g, or t
  misc_feature (1026)..(1026): n is a, c, g, or t
  misc_feature (1038)..(1038): n is a, c, g, or t
  misc_feature (1042)..(1042): n is a, c, g, or t
  misc_feature (1044)..(1044): n is a, c, g, or t
  misc_feature (1058)..(1059): n is a, c, g, or t
  misc_feature (1071)..(1071): n is a, c, g, or t
  misc_feature (1078)..(1078): n is a, c, g, or t
  misc_feature (1081)..(1083): n is a, c, g, or t
  misc_feature (1098)..(1098): n is a, c, g, or t
gaccggatggagatgaaacccttgctgaggatggagacgcatccccagaaaagacgctacagcaagggcggcgcctgccggggcttgggggacgaccaccgccccgaggaccggggcttcggggtgcagagactgcggtccaaggcccagaacaaggagaacttcaggccggcctcctccgcggagcccgccgtgcagaaactggcgagcctgcggctgggcggggccgagccccggttgctgcgttgggacttgaccttctccccgccccagaaatccttgcctgtcgctctagagtccgacgaggagaatggggatgagctcaagtccagtacgggctcagcgcccatcctggtggtcatggtgatcttgctcaacatcggagtcgccattctgtttattaactttttcatctgatgagatgtcgcggtagcaaaaatagagaaagggtagaaaaaagggacattaaaattaaaagcaaaaccacaagaagggaaagaccgcaactcggacagcccagcgacttccaagtcctctcacagaagaaccacacgattgggtatcactcacagtttgcctttttttctgggtaatgttttttggattttagccaaaattctttgcttgtataacactctgctgtgtggcatggcagaaggaggccagcacgcagcccctccagctccacgtggagacagaagggatcccggcacatcagtggtaacagcggacgttgtcctcgtggtcacacgtcccgtctngggtgtggatgganggcagcccgggggcaaaacctcanccccgcgncccctgantggcanggctgactccccgtcnanncgancttaaaaagtggattcactgctttctctgtctaaaanaaanggtganaattatgggcangaagcatggggcanggtggccccccccantggggcannacctggccttttntgnngaaaatctgggctnccccctgaaggagggganggatnggcccnctccnccnttgaaaannangnnggntctttccttttntggnantgcccccggctttnntaaaaaaccaantccccanccnnnttttaaaaaaaaccnttt

SEQ ID NO: 578 - DNA, 1100 bp, Homo sapiens
  misc_feature (716)..(716): n is a, c, g, or t
  misc_feature (740)..(740): n is a, c, g, or t
  misc_feature (747)..(747): n is a, c, g, or t
  misc_feature (759)..(759): n is a, c, g, or t
  misc_feature (803)..(803): n is a, c, g, or t
  misc_feature (822)..(822): n is a, c, g, or t
  misc_feature (834)..(834): n is a, c, g, or t
  misc_feature (840)..(840): n is a, c, g, or t
  misc_feature (847)..(848): n is a, c, g, or t
  misc_feature (874)..(874): n is a, c, g, or t
  misc_feature (878)..(878): n is a, c, g, or t
  misc_feature (883)..(883): n is a, c, g, or t
  misc_feature (891)..(891): n is a, c, g, or t
  misc_feature (903)..(903): n is a, c, g, or t
  misc_feature (907)..(907): n is a, c, g, or t
  misc_feature (915)..(915): n is a, c, g, or t
  misc_feature (919)..(919): n is a, c, g, or t
  misc_feature (935)..(935): n is a, c, g, or t
  misc_feature (938)..(938): n is a, c, g, or t
  misc_feature (943)..(943): n is a, c, g, or t
  misc_feature (950)..(951): n is a, c, g, or t
  misc_feature (953)..(953): n is a, c, g, or t
  misc_feature (966)..(966): n is a, c, g, or t
  misc_feature (968)..(969): n is a, c, g, or t
  misc_feature (975)..(975): n is a, c, g, or t
  misc_feature (978)..(978): n is a, c, g, or t
  misc_feature (1012)..(1012): n is a, c, g, or t
  misc_feature (1019)..(1019): n is a, c, g, or t
  misc_feature (1028)..(1028): n is a, c, g, or t
  misc_feature (1033)..(1034): n is a, c, g, or t
  misc_feature (1052)..(1052): n is a, c, g, or t
  misc_feature (1055)..(1055): n is a, c, g, or t
  misc_feature (1062)..(1062): n is a, c, g, or t
  misc_feature (1067)..(1067): n is a, c, g, or t
  misc_feature (1071)..(1071): n is a, c, g, or t
  misc_feature (1079)..(1079): n is a, c, g, or t
  misc_feature (1088)..(1089): n is a, c, g, or t
  misc_feature (1095)..(1095): n is a, c, g, or t
  misc_feature (1098)..(1098): n is a, c, g, or t
gcccacgcgtccggagcggcgctctgccaggtggggccggagctgcggggagggagttggcgcctagcgcgcagctccatccccgcctctgcagtggactcggccgcagaatcggggtcccgggctcctggaacttgtcccccccaggccgcggcgaggagatctctggaccggattcgtcccattctcgtcctcatggtggacaagaaactggtggtggttttcggaggcacaggtgcccagggtggctccgtggcccgcatactcctggaagatgggacattcaaggttcgagtggtgacccgaaaccctaggaagaaggcagcaaaggagctgaggctgcaaggtgcagaagtagtgcagggagaccaagatgaccaggtcatcatggagctggccctgaatggggcttacgccaccttcatcgtgaccaattactgggagagctgcagccaggagcaggaggtcaagcaggggaagctgctcgctgatctggccaggcgcctgggcctccactatgtggtctacagcggcctggagaacatcaagaagctgacggcagggagattggccgccgcgcactttgacggcaaaggggaggtggaggaatatttccgggacattggcgttcccatgaccagtgtgcggctgccctgctattttgagaacctcctctcccactttcttgccccaaaaagcccccagacggaaaaaanctacttgctgaaccttgcccacangttgaangttccccatggnaatggcatgtccgtggtctgaacctggggtccctggggtggctnaaccctttttgaaaatgcnaaaaaaaatacnttcggnccaaaannttcgggctgaaacactttgccaggcncacnggccnaaagaaanaacccttccctngttnaccaaaanacanccccccaaggttcttncancaatnccaaaannanctcctgaagaaanannaaaaanttngttttttcccggggccccgggaacctggccaaantttttcnttttttatnccctnnaaacccaaccgtaaattnaantgaaccntaaantccnaccccaangccctaaanntggaanatngg

SEQ ID NO: 579 - DNA, 1091 bp, Homo sapiens
  misc_feature (768)..(768): n is a, c, g, or t
  misc_feature (771)..(771): n is a, c, g, or t
  misc_feature (799)..(799): n is a, c, g, or t
  misc_feature (806)..(806): n is a, c, g, or t
  misc_feature (839)..(839): n is a, c, g, or t
  misc_feature (844)..(844): n is a, c, g, or t
  misc_feature (852)..(852): n is a, c, g, or t
  misc_feature (871)..(871): n is a, c, g, or t
  misc_feature (882)..(882): n is a, c, g, or t
  misc_feature (885)..(885): n is a, c, g, or t
  misc_feature (908)..(908): n is a, c, g, or t
  misc_feature (923)..(923): n is a, c, g, or t
  misc_feature (932)..(932): n is a, c, g, or t
  misc_feature (936)..(936): n is a, c, g, or t
  misc_feature (943)..(943): n is a, c, g, or t
  misc_feature (947)..(947): n is a, c, g, or t
  misc_feature (955)..(955): n is a, c, g, or t
  misc_feature (964)..(964): n is a, c, g, or t
  misc_feature (967)..(967): n is a, c, g, or t
  misc_feature (971)..(971): n is a, c, g, or t
  misc_feature (974)..(974): n is a, c, g, or t
  misc_feature (977)..(977): n is a, c, g, or t
  misc_feature (982)..(982): n is a, c, g, or t
  misc_feature (991)..(991): n is a, c, g, or t
  misc_feature (997)..(997): n is a, c, g, or t
  misc_feature (1000)..(1000): n is a, c, g, or t
  misc_feature (1005)..(1005): n is a, c, g, or t
  misc_feature (1010)..(1010): n is a, c, g, or t
  misc_feature (1012)..(1012): n is a, c, g, or t
  misc_feature (1023)..(1023): n is a, c, g, or t
  misc_feature (1047)..(1047): n is a, c, g, or t
  misc_feature (1049)..(1050): n is a, c, g, or t
  misc_feature (1053)..(1053): n is a, c, g, or t
  misc_feature (1056)..(1056): n is a, c, g, or t
  misc_feature (1065)..(1065): n is a, c, g, or t
  misc_feature (1070)..(1070): n is a, c, g, or t
  misc_feature (1084)..(1085): n is a, c, g, or t
  misc_feature (1091)..(1091): n is a, c, g, or t
ggcattattggcgtcaaccgcactcggcaggtggacaaccacgtcattggagacccgggtagtgttgtctacgacagcagctttgacctcttcaaggaaattgggcacctgtgtcacctctgcaaggccatcgcagccaactccgagctggtgaagccgggtggggcccagtgcctgccttcaggctacagcatctcctccttcctgcagatgttgcaccctgagtgcaaggagctgcccgagcccaacctgctcccggggcagctgtcccacggggcagtgggcgtcagggagggccgcgtgcagtggatctccatggctttcgagtcgaccacgtacaagggcaaatcctccttccagacctactcggactacctgcgctgggagagcttcctccagcagcagctgcaggccttgcccgagggctcagtcctgcgccggggcttccagacctgcgagcactggaagcagatattcatggaaatcgtaggggtgcagagcgccctgtgcggcctggtgctatccctgctcatctgcgtggccgcggtggccgtgttcaccacccacatcctgctcctgctgcccgtgctcctcagcatcttgggcatcgtgtgcctggtggtgaccatcatgtactggagcggctgggagatgggggctgtggaagccatctccctgtccatcctcgttggctcctccgtggattactgcgtccacctggtcgagggctacctgctggctggaaagaacctgccccccaccaggccnagnacgcccgaacgcagcgccagtggcgtangctggangccgtgcggcacgtgggcgtggccatcgtctcnagtgnccctcacnacggtcatcgccaaagtgnccccttttttntgnatcatcgccccatttgccaagtncggcaaaattggggnactcaaaangggnggggtcnatcntttaaaancttaacgtnaanaccnccntgntgggnattatgggncccaanttntttcnttcgnanccggaatttcntttctcaaagcccttgggtgcccngnnttntgnaaaggcccntgggnctggtgcctgcctnnggcccn

SEQ ID NO: 580 - DNA, 1066 bp, Homo sapiens
  misc_feature (771)..(771): n is a, c, g, or t
  misc_feature (789)..(789): n is a, c, g, or t
  misc_feature (796)..(796): n is a, c, g, or t
  misc_feature (814)..(814): n is a, c, g, or t
  misc_feature (828)..(828): n is a, c, g, or t
  misc_feature (830)..(830): n is a, c, g, or t
  misc_feature (835)..(835): n is a, c, g, or t
  misc_feature (885)..(885): n is a, c, g, or t
  misc_feature (896)..(896): n is a, c, g, or t
  misc_feature (899)..(899): n is a, c, g, or t
  misc_feature (912)..(912): n is a, c, g, or t
  misc_feature (920)..(920): n is a, c, g, or t
  misc_feature (924)..(924): n is a, c, g, or t
  misc_feature (972)..(972): n is a, c, g, or t
  misc_feature (975)..(976): n is a, c, g, or t
  misc_feature (979)..(979): n is a, c, g, or t
  misc_feature (985)..(986): n is a, c, g, or t
  misc_feature (989)..(989): n is a, c, g, or t
  misc_feature (994)..(994): n is a, c, g, or t
  misc_feature (997)..(997): n is a, c, g, or t
  misc_feature (1006)..(1006): n is a, c, g, or t
  misc_feature (1013)..(1013): n is a, c, g, or t
  misc_feature (1019)..(1019): n is a, c, g, or t
  misc_feature (1033)..(1033): n is a, c, g, or t
  misc_feature (1040)..(1040): n is a, c, g, or t
  misc_feature (1046)..(1046): n is a, c, g, or t
  misc_feature (1050)..(1050): n is a, c, g, or t
  misc_feature (1053)..(1055): n is a, c, g, or t
  misc_feature (1058)..(1058): n is a, c, g, or t
gcccacgcgtccgtgagtctcaagatggacaaccgggatgttgcaggaaaggctaaccggtggtttggggttgctccccctaaatctggaaaaatgaacatgaacatccttcaccaggaagagctcatcgctcagaagaaacgggaaattgaagccaaaatggaacagaaagccaagcagaatcaggtggccagccctcagcccccacatcctggcgaaatcacaaatgcacacaactcttcctgcatttccaacaagtttgccaacgatggtagcttcttgcagcagtttctgaagttgcagaaggcacagaccagcacagacgccccgaccagtgcgcccagcgcccctcccagcacacccacccccagcgctgggaagaggtccctgctcatcagcaggcggacaggcctggggctggccagcctgccgggccctgtgaagagctactcccacgccaagcagctgcccgtggcgcaccgcccgagtgtcttccagtcccctgacgaggacgaggaggaggactatgagcagtggctggagatcaaagtttcacccccagagggagccgagactcggaaagtgatagagaaattggcccgctttgtggcagaaggaggccccgagttagaaaaagtagctatggaggactacaaggataacccagcatttgcatttttgcacgataagaatagcagggaattcctctactacaggaagaaggtggctgagataagaaaggaagcacagaagtcgcaggcagcctctcanaaagtttcacccccagangacgaanaggtcaaaaaccttgcanaaaagttggccagntncatancggacgggggtcccgaggtggaaaccattgccctccaaaaaaaccgtganaaccaggcatncanctttttgtatgancccaatanccangggtacaagtactaccgaaaaaactggaagaaattcggaaagcaaggncanntcnaaggannttncaagnacntgatccggnctgaaanccaatnccctcttgaggccntttaggntcttancccnacnnnaantggcccgc

SEQ ID NO: 581 - DNA, 1089 bp, Homo sapiens
  misc_feature (770)..(770): n is a, c, g, or t
  misc_feature (809)..(809): n is a, c, g, or t
  misc_feature (811)..(811): n is a, c, g, or t
  misc_feature (814)..(814): n is a, c, g, or t
  misc_feature (829)..(829): n is a, c, g, or t
  misc_feature (846)..(846): n is a, c, g, or t
  misc_feature (849)..(849): n is a, c, g, or t
  misc_feature (899)..(899): n is a, c, g, or t
  misc_feature (915)..(915): n is a, c, g, or t
  misc_feature (922)..(922): n is a, c, g, or t
  misc_feature (933)..(933): n is a, c, g, or t
  misc_feature (936)..(936): n is a, c, g, or t
  misc_feature (944)..(944): n is a, c, g, or t
  misc_feature (947)..(947): n is a, c, g, or t
  misc_feature (949)..(949): n is a, c, g, or t
  misc_feature (955)..(955): n is a, c, g, or t
  misc_feature (966)..(966): n is a, c, g, or t
  misc_feature (979)..(979): n is a, c, g, or t
  misc_feature (988)..(988): n is a, c, g, or t
  misc_feature (990)..(990): n is a, c, g, or t
  misc_feature (996)..(996): n is a, c, g, or t
  misc_feature (1002)..(1002): n is a, c, g, or t
  misc_feature (1019)..(1019): n is a, c, g, or t
  misc_feature (1022)..(1022): n is a, c, g, or t
  misc_feature (1024)..(1024): n is a, c, g, or t
  misc_feature (1035)..(1035): n is a, c, g, or t
  misc_feature (1038)..(1038): n is a, c, g, or t
  misc_feature (1044)..(1044): n is a, c, g, or t
  misc_feature (1046)..(1047): n is a, c, g, or t
  misc_feature (1050)..(1050): n is a, c, g, or t
  misc_feature (1069)..(1069): n is a, c, g, or t
  misc_feature (1074)..(1078): n is a, c, g, or t
  misc_feature (1086)..(1086): n is a, c, g, or t
gctcctgcctccctgcagggagctgcttatgggacaccgcttcctgcgcggcctcttaacgctgctgctgccgccgccacccctgtatacccggcaccgcatgctcggtccagagtccgtcccgcccccaaaacgatcccgcagcaaactcatggcaccgccccgaatcgggacgcacaatggcaccttccactgcgacgaggcactggcatgcgcactgcttcgcctcctgccggagtaccgggatgcagagattgtgcggacccgggatcccgaaaaactcgcttcctgtgacatcgtggtggacgtggggggcgagtacgaccctcggagacaccgatatgaccatcaccagaggtctttcacagagaccatgagctccctgtcccctgggaagccgtggcagaccaagctgagcagtgcgggactcatctatctgcacttcgggcacaagctgctggcccagttgctgggcactagtgaagaggacagcatggtgggcaccctctatgacaagatgtatgagaactttgtggaggaggtggatgctgtggacaatgggatctcccagtgggcagagggggagcctcgatatgcactgaccactaccctgagtgcacgagttgctcgacttaatcctacctggaaccaccccgaccaagacactgaggcagggttcaagcgtgcaatggatctggttcaagaggagtttctgcagagattaaatttctaccaacacagctggctgccagcccgggccttggtggaanaggcccttgcccagcgattccaggtggacccaagtggananatngtggaactggcgaangtgcatgtccctggaangancatctctaccacctggaatctgggctgtccctccagtggccatctttttngttatctacctgacangctgganagtggcaaaanagngggggccnagnancccatnattcaaaccgntgccctgcaaacntggggggtntnggaaangcctgnacagtcagggatcctgntgntntctcagaaggnttntgggtncnnccnaagggctgaaaggccggcnctgcnnnnnactcaatncta

SEQ ID NO: 582 - DNA, 976 bp, Homo sapiens
  misc_feature (693)..(693): n is a, c, g, or t
  misc_feature (702)..(702): n is a, c, g, or t
  misc_feature (771)..(771): n is a, c, g, or t
  misc_feature (773)..(773): n is a, c, g, or t
  misc_feature (787)..(787): n is a, c, g, or t
  misc_feature (802)..(802): n is a, c, g, or t
  misc_feature (819)..(819): n is a, c, g, or t
  misc_feature (821)..(821): n is a, c, g, or t
  misc_feature (827)..(827): n is a, c, g, or t
  misc_feature (842)..(842): n is a, c, g, or t
  misc_feature (855)..(855): n is a, c, g, or t
  misc_feature (886)..(886): n is a, c, g, or t
  misc_feature (896)..(896): n is a, c, g, or t
  misc_feature (905)..(905): n is a, c, g, or t
  misc_feature (909)..(909): n is a, c, g, or t
  misc_feature (913)..(913): n is a, c, g, or t
  misc_feature (927)..(927): n is a, c, g, or t
  misc_feature (952)..(954): n is a, c, g, or t
  misc_feature (956)..(976): n is a, c, g, or t
ggggtgaccttctctgaggagtctgcagttcctgagaggagctggcgcctcaggccatacctgggctatgactggattgcagggtctctggacaccagctcttccatcaccagccagcctgaggccttcttctccaagctgcaggagtttcgggaaaccaacaaggaggagtgtatctgcagccatcctgaaccccagttgccaggcctgcgtgagagcagtggcagcggcgtggaggaagaccatgaatgcgtgtactgttaccgtgtcaaccggcgcctgttcccggtgcctgtggatcccggtaccccctgccgcctgtgcaggacaccgcgagaccagcagggccctgggaccctggcgcagccagcgcacgtcagggtgagcatcccgctgtcgatcctggagcccccgcaccggtaccacatccaccggcgaaagagctttgacgcctctgacacactggccctgccccggcactgcctgctgggctgggacatttttcctccgaagtctgagaaaagctcagcccccaggaacctggacctctggtcctctgtctccgctgaggcccagcaccagaagctgtccggcaccagcagcccttttcacccggcctcaccaatgcagatgctgcccccgaccccgacctggtcagtgccccaggtccctcggccccacgtcccacggcanaaccctgangactgactcctgggggaaaacagcattcccgccgcctccagcctctcccctctggcaggcgcacccagnanatggaatcccctgncccgccccagctcangcccagctgtcctaagntngggcangtgggtggacccaancttgtctgctgcntgaatttcaaaaaaggaagaacctggggtgnaaggtgaagnattctgtgnaaantttntaaaataaactcanggctcttgcacctcaaaaaaaaaannnannnnnnnnnnnnnnnnnnnnn

SEQ ID NO: 583 - DNA, 1114 bp, Homo sapiens
  misc_feature (727)..(727): n is a, c, g, or t
  misc_feature (750)..(750): n is a, c, g, or t
  misc_feature (791)..(791): n is a, c, g, or t
  misc_feature (815)..(815): n is a, c, g, or t
  misc_feature (823)..(823): n is a, c, g, or t
  misc_feature (831)..(831): n is a, c, g, or t
  misc_feature (860)..(860): n is a, c, g, or t
  misc_feature (887)..(887): n is a, c, g, or t
  misc_feature (898)..(898): n is a, c, g, or t
  misc_feature (902)..(902): n is a, c, g, or t
  misc_feature (916)..(916): n is a, c, g, or t
  misc_feature (919)..(919): n is a, c, g, or t
  misc_feature (936)..(936): n is a, c, g, or t
  misc_feature (948)..(948): n is a, c, g, or t
  misc_feature (975)..(976): n is a, c, g, or t
  misc_feature (981)..(981): n is a, c, g, or t
  misc_feature (984)..(984): n is a, c, g, or t
  misc_feature (986)..(986): n is a, c, g, or t
  misc_feature (992)..(992): n is a, c, g, or t
  misc_feature (996)..(996): n is a, c, g, or t
  misc_feature (1006)..(1006): n is a, c, g, or t
  misc_feature (1020)..(1020): n is a, c, g, or t
  misc_feature (1023)..(1023): n is a, c, g, or t
  misc_feature (1026)..(1026): n is a, c, g, or t
  misc_feature (1046)..(1046): n is a, c, g, or t
  misc_feature (1051)..(1051): n is a, c, g, or t
  misc_feature (1053)..(1053): n is a, c, g, or t
  misc_feature (1068)..(1068): n is a, c, g, or t
  misc_feature (1073)..(1073): n is a, c, g, or t
  misc_feature (1079)..(1079): n is a, c, g, or t
  misc_feature (1081)..(1081): n is a, c, g, or t
  misc_feature (1084)..(1084): n is a, c, g, or t
  misc_feature (1090)..(1090): n is a, c, g, or t
  misc_feature (1103)..(1103): n is a, c, g, or t
  misc_feature (1108)..(1108): n is a, c, g, or t
gggactccggcccagaagccggctcgcagcgcctgctgttttctcacgacctggtgtcgggccgttaccgtggctccgtgcacttcgggctggtgcgcctcatccacggcgaggactcggactcggagggcgaggaggagggccgcgggagctcggggtgctccgaggccgggggcgcgggccacgaggagggccgggccagccccctgcgccgcggctacgtgcgcgtccagtggtacccggagggcgtcaagcagcatgtgaaggagaccaagctgaaactagaggaccgttctgtggtgccccgagatgtggtccggcacatgcgatccaccgacagtcagtgtggcacggtgatcgacgtcaacatcgactgtgccgtcaagctcatcggcaccaactgcatcatctatcccgtcaacagcaaggacctgcagcacatctggcccttcatgtatggggactacattgcctatgactgctggctggggaaggtctacgacttgaagaaccagatcatcctgaagctatccaacggcgccaggtgctccatgaacacggaagatggcgccaagctctacgacgtctgcccgcacgtcagcgactcgggtctcttcttcgatgattcctatggcttctacccaggccaggtgctcattggccctgccaagatcttctccagcgtccagtggctgtcaggtgtcaagcccgtgctcagcaccaagancaagttccgagtggtggtggaanaagtgcaggttgtaaagttgaaagttacatggattaccaanagtttctgtccagggggcacgganagcgtcanccccccanccttttgtcatcacccaagaaaaacttangcagggtgaaacgtctcgaatgctttnaccatgctcancggncaacttggggaacnctntctgtatttcttcccanccaaaggtgaancccctgtttaaaaaaacaaggttttgnngaatnatntnatgctncccnaaaaaccaantgttcccgggaacnttnccntggaaaaacccaaaaaaaanggggnantccaaaccaaaaacnaaacngaaatntnccncccctnaaaaaaaaccccnaaggntttccc

SEQ ID NO: 584 - DNA, 814 bp, Homo sapiens
  misc_feature (151)..(151): n is a, c, g, or t
  misc_feature (206)..(206): n is a, c, g, or t
  misc_feature (211)..(211): n is a, c, g, or t
  misc_feature (304)..(304): n is a, c, g, or t
  misc_feature (368)..(368): n is a, c, g, or t
  misc_feature (370)..(370): n is a, c, g, or t
  misc_feature (382)..(382): n is a, c, g, or t
  misc_feature (390)..(390): n is a, c, g, or t
  misc_feature (402)..(402): n is a, c, g, or t
  misc_feature (410)..(410): n is a, c, g, or t
  misc_feature (429)..(429): n is a, c, g, or t
  misc_feature (463)..(463): n is a, c, g, or t
  misc_feature (488)..(488): n is a, c, g, or t
  misc_feature (496)..(496): n is a, c, g, or t
  misc_feature (498)..(498): n is a, c, g, or t
  misc_feature (506)..(506): n is a, c, g, or t
  misc_feature (508)..(508): n is a, c, g, or t
  misc_feature (522)..(523): n is a, c, g, or t
  misc_feature (539)..(539): n is a, c, g, or t
  misc_feature (556)..(557): n is a, c, g, or t
  misc_feature (559)..(559): n is a, c, g, or t
  misc_feature (574)..(574): n is a, c, g, or t
  misc_feature (576)..(576): n is a, c, g, or t
  misc_feature (580)..(580): n is a, c, g, or t
  misc_feature (591)..(591): n is a, c, g, or t
  misc_feature (593)..(593): n is a, c, g, or t
  misc_feature (595)..(595): n is a, c, g, or t
  misc_feature (616)..(616): n is a, c, g, or t
  misc_feature (623)..(623): n is a, c, g, or t
  misc_feature (627)..(627): n is a, c, g, or t
  misc_feature (657)..(657): n is a, c, g, or t
  misc_feature (666)..(668): n is a, c, g, or t
  misc_feature (682)..(682): n is a, c, g, or t
  misc_feature (696)..(696): n is a, c, g, or t
  misc_feature (698)..(698): n is a, c, g, or t
  misc_feature (711)..(711): n is a, c, g, or t
  misc_feature (715)..(715): n is a, c, g, or t
  misc_feature (726)..(726): n is a, c, g, or t
  misc_feature (728)..(728): n is a, c, g, or t
  misc_feature (733)..(733): n is a, c, g, or t
  misc_feature (739)..(739): n is a, c, g, or t
  misc_feature (744)..(744): n is a, c, g, or t
  misc_feature (750)..(750): n is a, c, g, or t
  misc_feature (755)..(755): n is a, c, g, or t
  misc_feature (759)..(759): n is a, c, g, or t
  misc_feature (761)..(761): n is a, c, g, or t
  misc_feature (766)..(766): n is a, c, g, or t
  misc_feature (768)..(768): n is a, c, g, or t
  misc_feature (775)..(776): n is a, c, g, or t
  misc_feature (784)..(784): n is a, c, g, or t
  misc_feature (798)..(798): n is a, c, g, or t
  misc_feature (804)..(804): n is a, c, g, or t
  misc_feature (807)..(807): n is a, c, g, or t
  misc_feature (813)..(813): n is a, c, g, or t
gccgagtccgcggcggcgtccagggtcggcagcaaccgcagccgagcccgagcgggtggcggcgccatggcgtgcgcggggctgctcaccgtgtgcctgctccggccgcccgcgccccagccccagccccagaccccgcggcacccccagntcgcgcccgacccggggcccgccggacacacgctcttccaggacgttttccgcanagcanacaagaatggagtacgagagggcctccaaagtggaccagtttgtgacgcgcttcctgctgcgggagacggtgagccagctgcaagcccttcanagctcgctggagggggcgtcagataccctggaggcccaggcccatggctggcggtcagatgcananagcgtggaggcncacagcangctctgcggcanccggcggncaggacgccgagccctgangagtgtcagccggtcatccacctggtcccccggntcttctgacacaggacgcagctcanaggccganangcagtggngnctccaggtgaaccnnctccagaagctcatcnaccagctcgagtgcaannanatcctcatggcccanangcangtccaggtggnanangaaggcctgcaggacttccancgagccntgcnctgctatgttggacttcacaggggccccanagccattgnnntgcatgtgtccgcncaaaaatgctgganantgcctccttcacncttntataaattctngnaaganttaagncctcntgaaanaatgnaccnancaatntncttgggnntcaaaggntcttcaaacagaanttctcntcnaacaant

SEQ ID NO: 585 - DNA, 1087 bp, Homo sapiens
  misc_feature (764)..(764): n is a, c, g, or t
  misc_feature (835)..(835): n is a, c, g, or t
  misc_feature (838)..(838): n is a, c, g, or t
  misc_feature (840)..(840): n is a, c, g, or t
  misc_feature (843)..(843): n is a, c, g, or t
  misc_feature (846)..(846): n is a, c, g, or t
  misc_feature (866)..(866): n is a, c, g, or t
  misc_feature (872)..(872): n is a, c, g, or t
  misc_feature (875)..(875): n is a, c, g, or t
  misc_feature (920)..(920): n is a, c, g, or t
  misc_feature (934)..(934): n is a, c, g, or t
  misc_feature (937)..(937): n is a, c, g, or t
  misc_feature (947)..(947): n is a, c, g, or t
  misc_feature (954)..(954): n is a, c, g, or t
  misc_feature (963)..(963): n is a, c, g, or t
  misc_feature (965)..(965): n is a, c, g, or t
  misc_feature (971)..(971): n is a, c, g, or t
  misc_feature (975)..(975): n is a, c, g, or t
  misc_feature (988)..(988): n is a, c, g, or t
  misc_feature (992)..(992): n is a, c, g, or t
  misc_feature (1000)..(1000): n is a, c, g, or t
  misc_feature (1029)..(1030): n is a, c, g, or t
  misc_feature (1043)..(1043): n is a, c, g, or t
  misc_feature (1045)..(1046): n is a, c, g, or t
  misc_feature (1056)..(1056): n is a, c, g, or t
  misc_feature (1058)..(1058): n is a, c, g, or t
  misc_feature (1060)..(1060): n is a, c, g, or t
  misc_feature (1068)..(1068): n is a, c, g, or t
gataatgaggactattccaggtatccgccaagagagtacagagcttcgggtagcagaagaggaatggcctatggacatattgactcttatggggcagatgatagtgaggaggagggggctgggcctgttgagcgaccgccagtgagagggaaaactggcaagtttaaagatgataagctgtatgacccagagaaaggggcaaggtctttggctgggccacctccacatttctctagttttagccgtgatgtgagagaggagcgagacaagttagacccagtccctgcagcaagatgctcagctagcagagctgacttcctgccacaaagtagtgtggcctcacagtcgtcttctgaaggcaagctggctacaaaaggtgacagctcggagagggagagaagggagcaaaatttacctgcacgtcccagcagggctcctgtgagtatttgtggtggtggggaaaacacctcaaagagtgcagaggaacctgtggtcaggcccaaaatcagaaacctggcaagtccaaactgcgtgaaaccaaaaattttttttgatactgatgatgatgacgatatgccacacagtacttccaggtggagggataccgccaatgacaatgagggccactcggatggcctggcaagaagagggagaggcgagagttcaagtggctatcccgagccaaagtaccctgaagacaaacgggaagcgaggagtgaccaagtgaaaccagaaaaggtgccgagacgacgacgcaccatggnccgacccctgacttctggacgcacagtgatgattactacaaaatactgcgacgaaaactctgacagtgacnaanantgnatngctgctctgcgtcggaaaantcgaanccnaaagcaaacccctgtcctccatggtgaaactgggaaactctgccngggaaaaaaaaacnggnaacctcccangctaagngagtgccancnctggcnccancccctgcccccgngctntgccaatnccgggctggccccgggcccattgctggcnncaatggcaaccantnncttgaaaaantncnaaaacctnttttcggaaaaacaagcct

SEQ ID NO: 586 - DNA, 976 bp, Homo sapiens
  misc_feature (704)..(704): n is a, c, g, or t
  misc_feature (813)..(813): n is a, c, g, or t
  misc_feature (820)..(820): n is a, c, g, or t
  misc_feature (837)..(837): n is a, c, g, or t
  misc_feature (876)..(876): n is a, c, g, or t
  misc_feature (884)..(885): n is a, c, g, or t
  misc_feature (891)..(891): n is a, c, g, or t
  misc_feature (899)..(899): n is a, c, g, or t
  misc_feature (901)..(901): n is a, c, g, or t
  misc_feature (914)..(914): n is a, c, g, or t
  misc_feature (917)..(917): n is a, c, g, or t
  misc_feature (921)..(921): n is a, c, g, or t
  misc_feature (931)..(931): n is a, c, g, or t
  misc_feature (933)..(933): n is a, c, g, or t
  misc_feature (938)..(938): n is a, c, g, or t
  misc_feature (945)..(945): n is a, c, g, or t
  misc_feature (949)..(949): n is a, c, g, or t
  misc_feature (951)..(951): n is a, c, g, or t
  misc_feature (957)..(957): n is a, c, g, or t
  misc_feature (965)..(976): n is a, c, g, or t
gcagctgtcaatagcaccggaaactgctatgtctggaatctgacggggggcattggtgacgaggtgacccagctcatccccaagactaagatccctgcccacacgcgctacgccctgcagtgtcgcttcagccccgactccacgctcctcgccacctgctcggctgatcagacgtgcaagatctggaggacgtccaacttctccctgatgacggagctgagcatcaagagcggcaaccccggggagtcctcccgcggctggatgtggggctgcgccttctcgggggactcccagtacatcgtcactgcttcctcggacaacctggcccggctctggtgtgtggagactggagagatcaagagagagtatggcggccaccagaaggctgttgtctgcctggccttcaatgacagtgtgctgggctagcctgtgacccctcgggactgcctggtgcaggtggtggcagctggagggacccatgcagcacccaggtcagagcagaccctcccctgccggcctgcgccagctggacctgatggccccctgtggcgccttgacctgctgggccaggctgccctgggactctcagcccccagttgcttatccagatgtgacagagctcgacccaagccaggctgcacactcctggactgggctagcctgcactgcctgggaaagtcggccgagggcccaaagctgctgangggtctgaggctggtgcccacccccaagctagtgtgttctctgcccctccctgcccgcgtttcagggcctcggtccataaagaacaccaccaccatggccaggtggaanggtttantaatcccctgccagcanctgtcctccctggtgcaggtggcctggccagcccactgnatggggannggccangctgggcnangtcgggggctcantcnggangtaataaaancnaaccnaaacccnaatntnctcggnaaaaaaannnnnnnnnnnn

SEQ ID NO: 587 - DNA, 908 bp, Homo sapiens
  misc_feature (639)..(639): n is a, c, g, or t
  misc_feature (682)..(682): n is a, c, g, or t
  misc_feature (689)..(689): n is a, c, g, or t
  misc_feature (732)..(732): n is a, c, g, or t
  misc_feature (735)..(735): n is a, c, g, or t
  misc_feature (737)..(737): n is a, c, g, or t
  misc_feature (756)..(756): n is a, c, g, or t
  misc_feature (758)..(758): n is a, c, g, or t
  misc_feature (791)..(791): n is a, c, g, or t
  misc_feature (797)..(797): n is a, c, g, or t
  misc_feature (802)..(802): n is a, c, g, or t
  misc_feature (805)..(805): n is a, c, g, or t
  misc_feature (820)..(820): n is a, c, g, or t
  misc_feature (830)..(830): n is a, c, g, or t
  misc_feature (837)..(837): n is a, c, g, or t
  misc_feature (843)..(844): n is a, c, g, or t
  misc_feature (849)..(849): n is a, c, g, or t
  misc_feature (860)..(860): n is a, c, g, or t
  misc_feature (862)..(863): n is a, c, g, or t
  misc_feature (866)..(867): n is a, c, g, or t
  misc_feature (883)..(883): n is a, c, g, or t
  misc_feature (888)..(888): n is a, c, g, or t
  misc_feature (891)..(891): n is a, c, g, or t
  misc_feature (898)..(898): n is a, c, g, or t
  misc_feature (900)..(900): n is a, c, g, or t
  misc_feature (908)..(908): n is a, c, g, or t
ggcaacatccagaacctggtgcagaggctcaaacgagggcgctgcccctaccactacgtggaggtcatggcctgcccctcaggctgcctgaacggcgggggccagctccaggccccagacaggcccagcagagagctcctccagcacgtggagagactgtacggcatggtccgggctgaggcgcccgaggacgcgcctggggttcaggagctgtacacacactggctgcagggcacggactcggagtgtgcaggtcgcttgctgcatacgcagtaccacgccgtggagaaggccagcactggcctgggcatccggtggtaggggctgcaggaccaggactcccaggaggccgtgtccatgtgtgacagcagaaccacatgccccaagaccccagggctccccccaaaattctgagtgagctgcagggtgtgctgggacccgagtaggagctaggactagccaggacccgcagccgcctcgtcacctccagttgggtgcctctgggttcccactggctctgcccaggtggggtggggtggcccaggcagcagaaggttccctgaggtcccagagcctgttccgttggccctgggccgaggcccacaggtgctgcccttgctgctgctggtcgggcacccnaagtgcgtgaggggcttcagcctgtcccggggttgcctgaggnaaaacanacgggttctcaccccctgaatttctggaagctttcctttgaanctntnttgcaaaaggtgggaaaananaacttggacctgcaaggggttggttccccccanaaaccnttgcnttntggaacccttggcanggggggggtnccaaggncccctnnaaaancaagggtttancnnttnnaaagtttttggttccngggcnaancccaatntncaaaacan

SEQ ID NO: 588 - DNA, 1087 bp, Homo sapiens
  misc_feature (749)..(749): n is a, c, g, or t
  misc_feature (779)..(779): n is a, c, g, or t
  misc_feature (786)..(786): n is a, c, g, or t
  misc_feature (823)..(823): n is a, c, g, or t
  misc_feature (843)..(843): n is a, c, g, or t
  misc_feature (908)..(908): n is a, c, g, or t
  misc_feature (931)..(931): n is a, c, g, or t
  misc_feature (945)..(945): n is a, c, g, or t
  misc_feature (953)..(954): n is a, c, g, or t
  misc_feature (957)..(957): n is a, c, g, or t
  misc_feature (961)..(962): n is a, c, g, or t
  misc_feature (971)..(971): n is a, c, g, or t
  misc_feature (981)..(981): n is a, c, g, or t
  misc_feature (987)..(987): n is a, c, g, or t
  misc_feature (989)..(989): n is a, c, g, or t
  misc_feature (992)..(992): n is a, c, g, or t
  misc_feature (1005)..(1005): n is a, c, g, or t
  misc_feature (1011)..(1011): n is a, c, g, or t
  misc_feature (1020)..(1020): n is a, c, g, or t
  misc_feature (1023)..(1023): n is a, c, g, or t
  misc_feature (1029)..(1029): n is a, c, g, or t
  misc_feature (1031)..(1031): n is a, c, g, or t
  misc_feature (1035)..(1035): n is a, c, g, or t
  misc_feature (1037)..(1037): n is a, c, g, or t
  misc_feature (1044)..(1044): n is a, c, g, or t
  misc_feature (1051)..(1051): n is a, c, g, or t
  misc_feature (1054)..(1054): n is a, c, g, or t
  misc_feature (1059)..(1059): n is a, c, g, or t
  misc_feature (1061)..(1062): n is a, c, g, or t
  misc_feature (1087)..(1087): n is a, c, g, or t
gcccacgcgtccgcccacgcgtccgctcccgggctcactcaaggagactgcggcatgttgaccacaccagactgggtttcagggaatgggcatgccaggtgccaaggagccaaacagatggctttccaggcagcaaggtccttggggccttcttggaggagcttgggtgacagccaggtgagcacccagaccccagaccctcatgtgctgtgtgcctggccccttctgtactggccatttgtggccagggccaagcctgtgactcaactccaggggcaagatggggagtgagctgatggctccgagactggtcaggagcccaggccagtgagatggggcctggagccttgtctgtgtcacattaggtaccatgggagctgctgagacctgacattttgtcccctgcctacatggcttggcccatggagaaggagcagtgaatgggatcgtcggggaagcccctcttcctgctctgctcccctggaaactgttgcaaaactcccagccgcctcatggcaaatgcccaaagcatgttccgcacccaggcgggggcccctgctaatgagaaccttggtgcagctgcagccaggaggggagcgggcccaggagccaggctcaggtccagctggttcctctctggcgccttctgaacccgtctcagcaggtccacagcacctgggcagaggtcagagaccaggggaggccgggccttgccctcccttctgcccagggcccagtgttcttgatanaaaacccttctggggagccagggagctcangggacanataagggaaggacgccccctgactccaggcccctgancctggcgggaaatggctgcngcccaagcagccagtcctggtggtgttctcctgcatgcctccgtggctggctgccccccaccggnccaatctgtttgactgcagaaanacggcgggccagantactcaannggnatannaattgctgntttctctggnaagaananagncaaacctttttgntctttntgcctgccnttnaaaacngncagntncaaaggnaccaaanggngaaancnngacttgcttccaattttcccggggn

SEQ ID NO: 589 - DNA, 1142 bp, Homo sapiens
  misc_feature (721)..(721): n is a, c, g, or t
  misc_feature (769)..(769): n is a, c, g, or t
  misc_feature (801)..(801): n is a, c, g, or t
  misc_feature (814)..(814): n is a, c, g, or t
  misc_feature (826)..(826): n is a, c, g, or t
  misc_feature (831)..(831): n is a, c, g, or t
  misc_feature (839)..(839): n is a, c, g, or t
  misc_feature (846)..(846): n is a, c, g, or t
  misc_feature (851)..(851): n is a, c, g, or t
  misc_feature (876)..(876): n is a, c, g, or t
  misc_feature (906)..(906): n is a, c, g, or t
  misc_feature (916)..(916): n is a, c, g, or t
  misc_feature (927)..(927): n is a, c, g, or t
  misc_feature (930)..(930): n is a, c, g, or t
  misc_feature (932)..(932): n is a, c, g, or t
  misc_feature (938)..(940): n is a, c, g, or t
  misc_feature (942)..(943): n is a, c, g, or t
  misc_feature (954)..(954): n is a, c, g, or t
  misc_feature (967)..(969): n is a, c, g, or t
  misc_feature (978)..(978): n is a, c, g, or t
  misc_feature (983)..(983): n is a, c, g, or t
  misc_feature (985)..(985): n is a, c, g, or t
  misc_feature (988)..(988): n is a, c, g, or t
  misc_feature (990)..(990): n is a, c, g, or t
  misc_feature (994)..(994): n is a, c, g, or t
  misc_feature (1006)..(1006): n is a, c, g, or t
  misc_feature (1016)..(1016): n is a, c, g, or t
  misc_feature (1025)..(1025): n is a, c, g, or t
  misc_feature (1031)..(1031): n is a, c, g, or t
  misc_feature (1037)..(1037): n is a, c, g, or t
  misc_feature (1044)..(1044): n is a, c, g, or t
  misc_feature (1052)..(1052): n is a, c, g, or t
  misc_feature (1072)..(1072): n is a, c, g, or t
  misc_feature (1075)..(1075): n is a, c, g, or t
  misc_feature (1097)..(1097): n is a, c, g, or t
  misc_feature (1100)..(1100): n is a, c, g, or t
  misc_feature (1103)..(1103): n is a, c, g, or t
  misc_feature (1105)..(1105): n is a, c, g, or t
  misc_feature (1119)..(1119): n is a, c, g, or t
  misc_feature (1130)..(1130): n is a, c, g, or t
  misc_feature (1133)..(1133): n is a, c, g, or t
gtggcgatgcacaacaaggcggcgccgccgcagatcccggacacccggcgggagctggcggagctcgtgaagcggaagcaggagctggcggaaacattggcaaatttggagcgacagatctatgcttttgagggaagctacctggaagacactcagatgtatggcaatattattcgtggctgggatcggtatctgaccaaccaaaaaaactccaatagcaaaaatgatcgaaggaaccggaagtttaaggaagctgagcggctcttcagtaaatcctcggttacctcagcagctgcagtaagtgcattggcaggagttcaggaccagctcattgaaaagagggagccaggaagtgggacggaaagtgacacttctccagacttccacaatcaggaaaatgagcccagccaggaggaccctgaggatctggatggatctgtgcagggagtgaaacctcagaaggctgcttcttctacttcctcagggagtcaccacagcagccataaaaagcgaaagaataaaaaccggcacagcccgtctggcatgtttgattatgactttgagattgatctgaagttaaacaaaaaaccacgagctgactattagaagacacattagtgcagaagcttccaggctgtaaagccctgcttcccttctctgacctcacaaagataaacatcccttcacctgagttcgtggccatccacctctgctctcccanacccagtgcctgtgactttgagtagtttgttctaatgtggtgacaaanaagtcatttctgtaaaaattgggtcttacttntgtcattttttantaacaaactgcnggaanatcaaaanaatgttntaatncccggcaagttgctaaactggggcnttttcccccttcttaaaaaaagaatgttcnccccccaaanctgggttggcnccnanctttcnnntnngaaaacccctncaaaaaatgttcnnngggtttttnttttntngcngnaaantaaaaacccaanttcccctttncaaaagggngccggnaaaaanccgggcnatttcccnaaaagggtttaaggtttccnggntttcccccgggggttttaaccnaanttncnttgggggttttttntaagccttttnaanccaaaattt

SEQ ID NO: 590 - DNA, 838 bp, Homo sapiens
  misc_feature (756)..(756): n is a, c, g, or t
  misc_feature (782)..(782): n is a, c, g, or t
  misc_feature (815)..(838): n is a, c, g, or t
ggtgactacacagtgcaggtcaggagcatcggccttcggggagagagtcccccagggccccgggtgcacttccgaactctcaagggttctgaccggctaccttcaaacagttcaagcccaggtgacatcacagtggaaggtctggatggagagcggccactgcagactggggaagtggtcatcattgtggtggtgttgctcatgtgggctgaaaaagtcaccatctatcaacaccatcgacgtttgagtgaagaaacacacccagaagagagatgcactaacaactggggatagggatggggtcagggggagcccaagatggtgatctgcccgagactcccagagggtaatgccactcccacaatctcaggcctggtacccatcctctttccactgtgagcagagccagaaggtaggtctgttcagagtctgtgcccctggacctggggagtggatatcagatgggatatctccttccattccccggtccaggggagagtcactagttgtaccctactccattaggtcccaaatgggggccccatttcacctgtatcaggactctgagcatccccagctgccccacatcttgcctctggccctcagagaggggtgtttctgtgggtactcctcttaccccagcaaataaaaggaattgtctgaccctagaggcagatgctgcactgcactactccaatgtcttccatggagcctcaggtgctccccctctcacctggcagccccttcagctgctantgatatcactttgttggacatttttncaataaaggttcttggacaaactgggaaaaaannnnnnnnnnnnnnnnnnnnnnnn

SEQ ID NO: 591 - DNA, 1225 bp, Homo sapiens
  misc_feature (800)..(800): n is a, c, g, or t
  misc_feature (803)..(803): n is a, c, g, or t
  misc_feature (810)..(810): n is a, c, g, or t
  misc_feature (814)..(814): n is a, c, g, or t
  misc_feature (841)..(841): n is a, c, g, or t
  misc_feature (865)..(865): n is a, c, g, or t
  misc_feature (881)..(881): n is a, c, g, or t
  misc_feature (891)..(891): n is a, c, g, or t
  misc_feature (897)..(897): n is a, c, g, or t
  misc_feature (908)..(908): n is a, c, g, or t
  misc_feature (944)..(944): n is a, c, g, or t
  misc_feature (952)..(952): n is a, c, g, or t
  misc_feature (955)..(955): n is a, c, g, or t
  misc_feature (983)..(983): n is a, c, g, or t
  misc_feature (988)..(989): n is a, c, g, or t
  misc_feature (993)..(993): n is a, c, g, or t
  misc_feature (1013)..(1013): n is a, c, g, or t
  misc_feature (1026)..(1026): n is a, c, g, or t
  misc_feature (1041)..(1041): n is a, c, g, or t
  misc_feature (1046)..(1047): n is a, c, g, or t
  misc_feature (1057)..(1057): n is a, c, g, or t
  misc_feature (1060)..(1061): n is a, c, g, or t
  misc_feature (1074)..(1074): n is a, c, g, or t
  misc_feature (1082)..(1082): n is a, c, g, or t
  misc_feature (1085)..(1085): n is a, c, g, or t
  misc_feature (1089)..(1090): n is a, c, g, or t
  misc_feature (1111)..(1111): n is a, c, g, or t
  misc_feature (1114)..(1114): n is a, c, g, or t
  misc_feature (1135)..(1135): n is a, c, g, or t
  misc_feature (1143)..(1143): n is a, c, g, or t
  misc_feature (1162)..(1162): n is a, c, g, or t
  misc_feature (1172)..(1172): n is a, c, g, or t
  misc_feature (1179)..(1179): n is a, c, g, or t
  misc_feature (1181)..(1181): n is a, c, g, or t
  misc_feature (1190)..(1190): n is a, c, g, or t
  misc_feature (1197)..(1198): n is a, c, g, or t
  misc_feature (1207)..(1207): n is a, c, g, or t
  misc_feature (1213)..(1213): n is a, c, g, or t
  misc_feature (1216)..(1217): n is a, c, g, or t
  misc_feature (1219)..(1220): n is a, c, g, or t
  misc_feature (1223)..(1223): n is a, c, g, or t
gcggcgggcggcgggcgggccgagggcagcgcgggcgggcctcgtcctcgccctcctgccctgggtgcggccccccgggtcccggcgcccactgccccggcgtcccgcgctccgcgcccgcccaggcacccaccagcggcgccgacctcagcgcgcacctatgggctcgctaccaggacatgcggagactggtgcacgacctcctgccccccgaggtctgcagtctcctgaacccagcagccatctacgccaacaacgagatcagcctgcgtgacgttgaggtctacggctttgactacgactacaccctggcccagtatgcagacgcactgcaccccgagatcttcagtaccgcccgtgacatcctgatcgagcactacaagtacccagaagggattcggaagtatgactacaaccccagctttgccatccgtggcctccactatgacattcagaagagccttctgatgaagattgacgccttccactacgtgcagctggggacagcctacaggggcctccagcctgtgccagacgaggaggtgattgagctgtatgggggtacccagcacatcccactataccagatgagtggcttctatggcaagggtccctccattaagcagttcatggacatcttctcgctaccggagatggctctgctgtcctgtgtggtggactactttctgggccacagcctggagtttgaccaagcacatctctacaaggacgtgacggacgccatccgagacgtgcatgtgaagggcctcatgtaccagtggatcgagcaggacatgganaantacatcntganaggggatgaaacgtttgctgtcctganccgcctggtggcccatgggaaaanagctgttcctcatcancaaaaagtcnttttanctttcgtaaanaaggggaatgcgggaaatggtgggttccgatttggncccagctnttncaatgtggtcattgtcaaggcaaaaaancccanntttntttcattgacgggggaagcnttttaaaaaattnaataaaaagggttcnttttnntgggaacggnatnnccccttggaaaangggaaaanttnttgnnagggaaaactgttttaatttnttnactttgaagaaaagggggggncccccggntttttttttgggaaaaccntttttattanttggggnanttttttttnggaaggnngggaaaagncctttnccnnannggngg

SEQ ID NO: 592 - DNA, 672 bp, Homo sapiens
  misc_feature (635)..(635): n is a, c, g, or t
gacgtcccgcgctccgcttggcccaagatggcggcctccgtgtgcagcgggttgctggggccacgggtgctgtcctggagccgagagctgccttgcgcttggcgcgccctgcacacctccccggtctgcgccaagaaccgggcggcccgagtacgcgtaagcaagggggacaagccggtgacctacgaggaggcacacgcgccgcactacatcgcccaccgtaaaggctggctgtcgctgcacacaggtaacctggatggagaggaccatgccgcagagcgaacggtggaggatgttttccttcgcaagttcatgcggggtaccttcccaggctgcctggctgaccagctggttttaaagcgccggggtaaccagttggagatctgtgccgtggtcctgaggcagttgtctccacacaagtactacttcctcgtgggctacagtgaaactttgctgtcctacttttacaaatgtcctgtgcgactccacctccaaactgtgccctcaaaggttgtgtataagtacctctagaacaatccccttttttccatcaagctgtagcctgcagagaatggaaacgtgggaaaggaatggtatgtgggggaaatgcatcccctcagaggactgaggcatantctctcatctgctattgaataaagaccttctatcttg

SEQ ID NO: 593 - DNA, 847 bp, Homo sapiens
gtgcaggctgtgagaaacgcggggtcgcggttcctgcggtcctggacttggccccagacagccggcagggtcgtggccagaacgccggccgggaccatctgcacaggcgctcgacagctccaagacgctgcggccaagcagaaagttgaacagaacgcggctcccagccacaccaagttcagcatttaccctcccattccaggagaggagagctctctgaggtgggcaggaaagaaatttgaggagatcccaattgcacacattaaagcatcccacaacaacacacagatccaggtagtctctgctagtaatgagccccttgcctttgcttcctgtggcacagagggatttcggaatgccaagaagggcacaggcatcgcagcacagacagcaggcatagccgcagcggcgagagctaaacaaaagggcgtgatccacatccgagttgtggtgaaaggcctggggccaggacgcttgtctgccatgcacggactgatcatgggcggcctggaagtgatctcaatcacagacaacaccccaatcccacacaacggctgccgccccaggaaggctcggaagctgtgatgggaaggaggcctgcacttggacctgacctcaagcctcagctccagtgggaccttgtaaaatgctccctgtcagagctctccagaatatgcttgttggagatccttcaggcagtaagggagagttttgcctccttacacagtggcctttgcttgcacctccagctggagatgggtgtgccccagaagtaagctttgcatctcttacaagaggggagctacaggggcagccgtggcctagcccaaactctgctctgagaaat

SEQ ID NO: 594 - DNA, 629 bp, Homo sapiens
gcccacgcgtccgcggacgcgtgggcgccggtggtggcggcagcggcggctgcgggggcaccgggccgcggcgccaccatggcggtgcgacaggcgctgggccgcggcctgcagctgggtcgagcgctgctgctgcgcttcacgggcaagcccggccgggcctacggcttggggcggccgggcccggcggcgggctgtgtccgcggggagcgtccaggctgggccgcaggaccgggcgcggagcctcgcagggtcgggctcgggcttcctaaccgtctccgcttcttccgccagtcggtggccgggctggcggcgcggttgcagcggcagttcgtggtgcgggcctggggctgcgcgggcccttgcggccgggcagtctttctggccttcgggctagggctgggcctcatcgaggaaaaacaggcggagagccggcgggcggtctcggcctgtcaggagatccaggcaatttttacccagaaaagcaagccggggcctgacccgttggacacgagacgcttgcagggctttcggctggaggagtatctgatagggcagtccattggtaaaggctgcagtgctgctgtgtatgaagccaccatgcctacattgccccataacctggaggt

SEQ ID NO: 595 - DNA, 757 bp, Homo sapiens
  misc_feature (681)..(681): n is a, c, g, or t
  misc_feature (695)..(695): n is a, c, g, or t
  misc_feature (727)..(727): n is a, c, g, or t
  misc_feature (740)..(741): n is a, c, g, or t
  misc_feature (744)..(748): n is a, c, g, or t
  misc_feature (750)..(754): n is a, c, g, or t
  misc_feature (756)..(757): n is a, c, g, or t
ggctctctaggcccctgtcagaggacacagggccctgagctgcccccaccagacccggctctgcaggacctatctctgaccctcatagcctctcctccttcctcacccagttcctcaggaaccccggccttacccggccacatgtcatccgaggaaagtggtaccagcatcagccttctgcctgccctgtccttggctgctccagacccagggcagagaagcagctcccagccctcaccagccatctgctcagcccctgccaccctgacccccaggtccccacacgccagccgtacccccagctccccactccagagctgcactcccagtctctcaccccgtagccatgtccccagtccacaccaggctcttgtgaccaggccccagaaacctagcctggagttcaaggagtttgtagggttgccctgcaagaatcggccgccttttcccaggaccggagctaccaggggagcccaggagccctgctctgtctgggaacccccaaagaggcatcgtgatggttctgccttccagtatgagtatgagccaccctgcacgtccctctgtgctcgggtccaagctgccaggcttcctccccagctcatggcctgggccttgcactttctgatggatgcacagccagggtctgagccaactccgatgtgagacgtcacgcagganagataccgctccanactctgctttcctttgagttttttaataaaanaatctcatgcggnnggnnnnnannnnnann

SEQ ID NO: 596 - DNA, 1090 bp, Homo sapiens
  misc_feature (835)..(835): n is a, c, g, or t
  misc_feature (837)..(837): n is a, c, g, or t
  misc_feature (855)..(855): n is a, c, g, or t
  misc_feature (875)..(875): n is a, c, g, or t
  misc_feature (885)..(885): n is a, c, g, or t
  misc_feature (887)..(887): n is a, c, g, or t
  misc_feature (891)..(891): n is a, c, g, or t
  misc_feature (897)..(897): n is a, c, g, or t
  misc_feature (901)..(901): n is a, c, g, or t
  misc_feature (908)..(908): n is a, c, g, or t
  misc_feature (914)..(914): n is a, c, g, or t
  misc_feature (916)..(916): n is a, c, g, or t
  misc_feature (920)..(920): n is a, c, g, or t
  misc_feature (922)..(922): n is a, c, g, or t
  misc_feature (926)..(926): n is a, c, g, or t
  misc_feature (935)..(935): n is a, c, g, or t
  misc_feature (976)..(976): n is a, c, g, or t
  misc_feature (1002)..(1002): n is a, c, g, or t
  misc_feature (1023)..(1023): n is a, c, g, or t
  misc_feature (1029)..(1029): n is a, c, g, or t
  misc_feature (1034)..(1034): n is a, c, g, or t
  misc_feature (1039)..(1039): n is a, c, g, or t
  misc_feature (1047)..(1047): n is a, c, g, or t
  misc_feature (1050)..(1050): n is a, c, g, or t
  misc_feature (1056)..(1056): n is a, c, g, or t
  misc_feature (1060)..(1060): n is a, c, g, or t
  misc_feature (1063)..(1063): n is a, c, g, or t
  misc_feature (1072)..(1072): n is a, c, g, or t
  misc_feature (1075)..(1075): n is a, c, g, or t
  misc_feature (1077)..(1077): n is a, c, g, or t
  misc_feature (1080)..(1080): n is a, c, g, or t
  misc_feature (1083)..(1083): n is a, c, g, or t
gccgactacgaccccagccagccgaggaagaaaaagcgcgaggcccccttgacgggcaagaagaagcgcaagtcgcccttcgccgcggccgtggggcaggagaagcccgtgttcgaacccggggacaagacgttcgaggagtacctggatgagtattaccggctggactacgaggacatcatcgacgacctgccctgtcgcttcaagtaccgcacagtggtgccctgtgactttggcctcagcactgaggagatcctcgctgctgacgataaggagctgaaccggtggtgctccctaaagaagacctgcatgtacaggtcagagcaggaggagctgcgggacaagcgggcgtacagccagaaggcccagaactcatggaaaaagcggcaggtcttcaagtcactctgccgagaagaggcagagacacctgcggaagccacagggaagccacagagagatgaagccggcccacagaggcagctgccagcccttgatggcagcttgatggggccggagagtcccccagcacaggaagaggaagcccctgtatcaccccacaagaagccagccccccagaagcggaggagggccaagaaggcacggctgctgggccccactgtgatgcttggtggatgcgagttcagccgccagagactgcaggcctttggcctcaaccccaaacggctgcacttccgccagctgggccggcagcggaggaaacaacaggggcccaagaacagctcctgagcaccagggagcaggcaggggcctcaggctcctctcctcaatcaagccctggacagggtctcgcacccacaagtactatctgctgcananatcctctcatctgtggcnaggcacgcctgtattcccancactttggangncgangtgaangatnccttgancccagnanttgnanacancgtgggcanttacgagactcctctctacaaatgggggaccatgcctgtantcccactactcaggagctggggaagnaaatccttaaggcctgatttnaggctnaaaanctttnattgcccnttnccttcncctnggnaaaaaaaanacntnttnttnaaaaaaa

SEQ ID NO: 597 - DNA, 1004 bp, Homo sapiens
  misc_feature (714)..(714): n is a, c, g, or t
  misc_feature (717)..(717): n is a, c, g, or t
  misc_feature (726)..(726): n is a, c, g, or t
  misc_feature (805)..(805): n is a, c, g, or t
  misc_feature (810)..(810): n is a, c, g, or t
  misc_feature (836)..(836): n is a, c, g, or t
  misc_feature (838)..(838): n is a, c, g, or t
  misc_feature (851)..(851): n is a, c, g, or t
  misc_feature (856)..(856): n is a, c, g, or t
  misc_feature (864)..(864): n is a, c, g, or t
  misc_feature (866)..(866): n is a, c, g, or t
  misc_feature (873)..(873): n is a, c, g, or t
  misc_feature (895)..(895): n is a, c, g, or t
  misc_feature (916)..(916): n is a, c, g, or t
  misc_feature (924)..(924): n is a, c, g, or t
  misc_feature (932)..(932): n is a, c, g, or t
  misc_feature (942)..(942): n is a, c, g, or t
  misc_feature (944)..(944): n is a, c, g, or t
  misc_feature (946)..(946): n is a, c, g, or t
  misc_feature (949)..(949): n is a, c, g, or t
  misc_feature (955)..(955): n is a, c, g, or t
  misc_feature (958)..(958): n is a, c, g, or t
  misc_feature (966)..(966): n is a, c, g, or t
  misc_feature (980)..(980): n is a, c, g, or t
  misc_feature (985)..(985): n is a, c, g, or t
  misc_feature (991)..(992): n is a, c, g, or t
  misc_feature (996)..(997): n is a, c, g, or t
  misc_feature (999)..(999): n is a, c, g, or t
gtgcagctcggcttcccccggcacccctccccctcgggcgccagccccacccctccgccggccgggccgaccccgccgtactatcccctgcggcgcgagcccggggcggctccaagcgccccccagcagacccccatcatgggcagccagagctccaaggctccccggggcgacgtgaccgccgaggaggcagcaggcgcttcccccgcgaaggccaacggccaggagaatggccacgtgaaaagcaatggagacttatcccccaagggtgaaggggagtcgccccctgtgaacggaacagatgaggcagccggggccactggcgatgccatcgagccagcaccccctagccagggtgctgaggccaagggggaggtcccccccaaggagacccccaagaagaagaagaaattctctttcaagaagcctttcaaattgagcggcctgtccttcaagagaaatcggaaggagggtgggggtgattcttctgcctcctcacccacagaggaagagcaggagcagggggagatcggtgcctgcagcgacgagggcactgctcaggaagggaaggccgcagccacccctgagagccaggaaccccaggccaagggggcagaggctagtgcagcctcagaagaagaggcagggccccaggctacagagccatccactccctcggggccggagagtggccctacaccagccagcgctgancanaatgagtanctaggtaggggcaggtggggtgatctctaagctgcaaaaaactgtgctgtcctttgtgaggtcactgcctggaactggntgccntggctgccttcctgtggccaaaaaangnaaggggctattgncttcntcccagcnanggttccntttcctccttctccctccctgngggattcttcccattaaaccnattttggntttttccntttttaaggncnanttnaaaaanggntccccttnaaagctttcccaantttangtttanngganngngaaaa

SEQ ID NO: 598 - DNA, 1137 bp, Homo sapiens
  misc_feature (785)..(785): n is a, c, g, or t
  misc_feature (825)..(825): n is a, c, g, or t
  misc_feature (842)..(842): n is a, c, g, or t
  misc_feature (846)..(846): n is a, c, g, or t
  misc_feature (852)..(852): n is a, c, g, or t
  misc_feature (864)..(864): n is a, c, g, or t
  misc_feature (868)..(868): n is a, c, g, or t
  misc_feature (879)..(879): n is a, c, g, or t
  misc_feature (886)..(886): n is a, c, g, or t
  misc_feature (893)..(893): n is a, c, g, or t
  misc_feature (911)..(911): n is a, c, g, or t
  misc_feature (922)..(922): n is a, c, g, or t
  misc_feature (927)..(927): n is a, c, g, or t
  misc_feature (930)..(930): n is a, c, g, or t
  misc_feature (939)..(939): n is a, c, g, or t
  misc_feature (948)..(948): n is a, c, g, or t
  misc_feature (954)..(954): n is a, c, g, or t
  misc_feature (958)..(958): n is a, c, g, or t
  misc_feature (967)..(967): n is a, c, g, or t
  misc_feature (988)..(988): n is a, c, g, or t
  misc_feature (1024)..(1024): n is a, c, g, or t
  misc_feature (1031)..(1034): n is a, c, g, or t
  misc_feature (1036)..(1036): n is a, c, g, or t
  misc_feature (1038)..(1051): n is a, c, g, or t
  misc_feature (1054)..(1054): n is a, c, g, or t
  misc_feature (1064)..(1064): n is a, c, g, or t
  misc_feature (1070)..(1071): n is a, c, g, or t
  misc_feature (1075)..(1075): n is a, c, g, or t
  misc_feature (1089)..(1089): n is a, c, g, or t
  misc_feature (1092)..(1092): n is a, c, g, or t
  misc_feature (1098)..(1098): n is a, c, g, or t
  misc_feature (1105)..(1105): n is a, c, g, or t
  misc_feature (1107)..(1107): n is a, c, g, or t
  misc_feature (1117)..(1117): n is a, c, g, or t
  misc_feature (1125)..(1126): n is a, c, g, or t
ggcagcgacaatgattcggagctcgaggatgctgacataaagaaggagctgcagagtctgcgggagaagcacctgaaggagatctcggagctgcagagccagcagaagcaggagatcgaagctctgtaccgccgcctgggcaagccactgccccccaacgtgggcttcttccacacggcaccccccactggccgccggagaaaaaccagcaagagcaagctgaaggcaggcaagctgctaaatcccctggtgcggcagctcaaggtcgtggcctccagcacaggtcacttggctgactccagcagaggccctcccgctaaggaccctgcccaagccagtgtggggctcactgcagacagcacgggcctgagcgggaaggcagtgcagacccagcagccctgctccgtccgggcctccctgtcttcggacatctgctccggcttagccagtgatggaggcggagcgcgtggccaagggtcctccaccagcagcctggccccaggccctgagccaggcccccagcccgccctgcacgtccaggcgcaggtgaacaacagcaacaacaagaagggtaccttcacggacgacctgcacaagctggtggacgagtggacgagcaagacggtgggggccgcgcagctgaagcccacgctcaaccagctgaagcagacccagaagctgcaagacatggaggcccaggcaggctgggctgcccctggcgaggcgcgggctatgaccgcacctcgagcaggagtggggatgccacgtctgccccagcgcccggncctctgtccaccacggtcattccggaagccgccccgaccntgtccgtgccccaccanatcntgaaantgaaaacctgantgancccgcctaaangccaggnccacttnacgccgtctaatggaaantgacgaacccncaggncanctgctctcntgtccagtnacgctntttnaaccctttntaaaccttttttttccattgnaaaccaatgtatgcaaaaaaaaaaatttttggggcnaaaaaannnnanannnnnnnnnnnnnnaangggggccccncctaanngggnccaataaacttatnacngaactnggacccntnttaaaatccnaaagaccnnaaactcctttg

SEQ ID NO: 599 - DNA, 738 bp, Homo sapiens
  misc_feature (506)..(506): n is a, c, g, or t
  misc_feature (511)..(511): n is a, c, g, or t
  misc_feature (590)..(590): n is a, c, g, or t
  misc_feature (600)..(600): n is a, c, g, or t
  misc_feature (617)..(617): n is a, c, g, or t
  misc_feature (620)..(620): n is a, c, g, or t
  misc_feature (624)..(624): n is a, c, g, or t
  misc_feature (628)..(629): n is a, c, g, or t
  misc_feature (634)..(634): n is a, c, g, or t
  misc_feature (645)..(645): n is a, c, g, or t
  misc_feature (651)..(651): n is a, c, g, or t
  misc_feature (673)..(673): n is a, c, g, or t
  misc_feature (675)..(676): n is a, c, g, or t
  misc_feature (689)..(689): n is a, c, g, or t
  misc_feature (696)..(696): n is a, c, g, or t
  misc_feature (707)..(707): n is a, c, g, or t
  misc_feature (719)..(719): n is a, c, g, or t
  misc_feature (724)..(724): n is a, c, g, or t
  misc_feature (726)..(726): n is a, c, g, or t
  misc_feature (728)..(728): n is a, c, g, or t
  misc_feature (730)..(731): n is a, c, g, or t
  misc_feature (733)..(733): n is a, c, g, or t
  misc_feature (736)..(736): n is a, c, g, or t
gtgcgggctcatcctcaattcttagcgatggagtgtacgagaggcacatggaccctctgctgctaccaggcgagctcgcgagccccagccaggcccttggagctggggagatcccggcaccttctgagacaccctggctttctccggaccccctgtttctggaacagaggagggtcagagaagcaaagaccgaagaggacggccctgccaacaccgagcagaagctgaagtcctttccagaggaccctcagcacctgggggagtggggccacctggaccctgccgaggagaacctgaagagctaccggaagctgctcctgtgggggtatcagctttcccagcctgacgctgcctccaggctggacactgaggaactccggttggtggaaagagatccacaaggaagcagcctcccagaaggcgggaggcggcaggagagcgctgggtgcgcctgcgaggaggccgcccccgcgggggtgctgcctgagctgcctacggaggcgccncctgnggacgcccttgccgatcccccgtcgggcaccactgaggaggaggaagaacagcctgggaaggccccggacccgcagganccccaggacncagaagtccgactctgnccnccgnaatnncaaangcaatccgtcntccaancaaccctggccccggaaagggncnncgactaaactggngaaaccnataaagccccncccccgaagaanggggnancngnnanaancc

SEQ ID NO: 600 - DNA, 1167 bp, Homo sapiens
  misc_feature (747)..(747): n is a, c, g, or t
  misc_feature (756)..(756): n is a, c, g, or t
  misc_feature (780)..(780): n is a, c, g, or t
  misc_feature (839)..(839): n is a, c, g, or t
  misc_feature (877)..(877): n is a, c, g, or t
  misc_feature (887)..(887): n is a, c, g, or t
  misc_feature (902)..(902): n is a, c, g, or t
  misc_feature (908)..(908): n is a, c, g, or t
  misc_feature (919)..(919): n is a, c, g, or t
  misc_feature (923)..(923): n is a, c, g, or t
  misc_feature (941)..(941): n is a, c, g, or t
  misc_feature (950)..(950): n is a, c, g, or t
  misc_feature (957)..(957): n is a, c, g, or t
  misc_feature (969)..(969): n is a, c, g, or t
  misc_feature (973)..(974): n is a, c, g, or t
  misc_feature (982)..(982): n is a, c, g, or t
  misc_feature (987)..(987): n is a, c, g, or t
  misc_feature (996)..(996): n is a, c, g, or t
  misc_feature (1002)..(1002): n is a, c, g, or t
  misc_feature (1004)..(1004): n is a, c, g, or t
  misc_feature (1007)..(1007): n is a, c, g, or t
  misc_feature (1011)..(1011): n is a, c, g, or t
  misc_feature (1013)..(1013): n is a, c, g, or t
  misc_feature (1020)..(1020): n is a, c, g, or t
  misc_feature (1028)..(1028): n is a, c, g, or t
  misc_feature (1038)..(1038): n is a, c, g, or t
  misc_feature (1054)..(1054): n is a, c, g, or t
  misc_feature (1061)..(1061): n is a, c, g, or t
  misc_feature (1063)..(1063): n is a, c, g, or t
  misc_feature (1071)..(1071): n is a, c, g, or t
  misc_feature (1092)..(1092): n is a, c, g, or t
  misc_feature (1105)..(1105): n is a, c, g, or t
  misc_feature (1133)..(1133): n is a, c, g, or t
  misc_feature (1135)..(1135): n is a, c, g, or t
  misc_feature (1137)..(1137): n is a, c, g, or t
  misc_feature (1146)..(1146): n is a, c, g, or t
  misc_feature (1149)..(1149): n is a, c, g, or t
  misc_feature (1156)..(1156): n is a, c, g, or t
ggattccgggctgtcatggcgacccccaacaatctgacccccaccaactgcagctggtggcccatctccgcgctggagagcgatgcggccaagccagcggaggcccccgacgctcccgaggcggccagccccgcccattggcccagggagagcctggttctgtaccactggacccagtccttcagctcgcagaaggtgcggctggtgatcgccgagaagggcctggtgtgcgaggagcgggacgtgagcctgccacagagcgagcacaaggagccctggttcatgcggctcaacctgggcgaggaggtgcccgtcatcatccaccgcgacaacatcatcagtgactatgaccagatcattgactatgtggagcgcaccttcacaggagagcacgtggtggccctgatgcccgaggtgggcagcctgcagcacgcacgggtgctgcagtaccgggagctgctggacgcactgcccatggatgcctacacgcatggctgcatcctgcatcccgagctcaccaccgactccatgatccccaagtacgccacggccgagatccgcagacatttagccaatgccaccacggacctcatgaaactggaccatgaagaggagccccagctctccgagccctacctttctaaacaaaagaagctcatggccaagatcttggagcatgatgatgtgagctacctgaagaagatcctcggggaactggccatggtgctggaccagattgaggcgganctggagaanaggaagctggagaacgaggggcanaaatgcgagctgtggctctgtggctgtgccttcaccctcgctgatgtcctcctgggganccaccctgcaccgcctcaagttcctgggaatgtccaanaatacttggnaaaatggcaaccggnccaacntgcagtccttntttnaaagggtccaaaaaaccntttgccttncggaaangtcctgggtganatcnnaccacccntggtntcgggcgtnatcccnantgntttncngggttgntcaaaaanaaaaaccccnatttttttttgggggnttctttntnatgggctncctgggggggaaggggcttanttttcccactggnaaccttaaaaaaaaaaaaattttaaggncnanccttggggnttnttgtttnttaaaaaaaaa

SEQ ID NO: 601 - DNA, 901 bp, Homo sapiens
  misc_feature (647)..(647): n is a, c, g, or t
  misc_feature (679)..(679): n is a, c, g, or t
  misc_feature (691)..(691): n is a, c, g, or t
  misc_feature (712)..(712): n is a, c, g, or t
  misc_feature (741)..(741): n is a, c, g, or t
  misc_feature (749)..(749): n is a, c, g, or t
  misc_feature (787)..(787): n is a, c, g, or t
  misc_feature (794)..(794): n is a, c, g, or t
  misc_feature (809)..(809): n is a, c, g, or t
  misc_feature (811)..(811): n is a, c, g, or t
  misc_feature (824)..(824): n is a, c, g, or t
  misc_feature (829)..(829): n is a, c, g, or t
  misc_feature (834)..(834): n is a, c, g, or t
  misc_feature (836)..(836): n is a, c, g, or t
  misc_feature (844)..(844): n is a, c, g, or t
  misc_feature (851)..(851): n is a, c, g, or t
  misc_feature (853)..(853): n is a, c, g, or t
  misc_feature (866)..(866): n is a, c, g, or t
  misc_feature (873)..(873): n is a, c, g, or t
  misc_feature (879)..(879): n is a, c, g, or t
  misc_feature (881)..(881): n is a, c, g, or t
  misc_feature (883)..(883): n is a, c, g, or t
  misc_feature (885)..(901): n is a, c, g, or t
gctggcgacaaaatggctgcccgagggagacgggcggagcctcagggccgggaggctccgggccccgcgggcggtggcggtggcgggagccgttgggctgagtcgggatcggggacgtcgcccgagagcggggacgaggaggtgtcgggcgcgggttcgagcccggtgtcgggcggcgtgaacttgttcgccaacgacggcagcttcctggagctgttcaagcggaagatggaggaggagcagcggcagcggcaggaggagccgcccccgggtccgcagcgacccgaccagtcggccgccgccgctggccccggggatccgaagaggaagggcggtccgggctccacacttagcttcgtgggcaaacgcagaggcgggaacaaactagccctcaagacgggaatagtagccaagaagcagaagacggaggatgaggtattaacaagtaaaggtgacgcgtgggccaagtacatggcagaagtgaaaaagtacaaagctcaccagtgcggtgacgatgataaaactcggcccctggtgaaatgacgcccctcccccacctgcccatggcctgggactctctgcgatgtacataactatttaatgcagcggcagcggcgacagccttccctgagaggacttaaaagcanaaagaaaccgaaatgctttccgcagccgtggnacgattctccangactcttttttttaccttgancacttgcctcgtgagacttcataaaacantggtttantgtccccccccttttcaccttcctcatttttctctggntcttttntgtcttcctcttttnanccttccttccctnccccnttaancnatcatttntgggaantnaaaaaaattttgnctttttnaaaaanananannnnnnnnnnnnnnnnn

SEQ ID NO: 602 - DNA, 811 bp, Homo sapiens
ggagagctgcaccgcgcgggacaagtcgccggcggcgcccgacggagcagaagagagagcatggagctggagaggatcgtcagtgcagccctccttgcctttgtccagacacacctcccggaggccgacctcagtggcttggatgaggtcatcttctcctatgtgcttggggtcctggaggacctgggcccctcgggcccatcagaggagaacttcgatatggaggctttcactgagatgatggaggcctatgtgcctggcttcgcccacatccccaggggcacaataggggacatgatgcagaagctctcagggcagctgagcgatgccaggaacaaagagaacctgcaaccgcagagctctggtgtccaaggtcaggtgcccatctccccagagcccctgcagcggcccgaaatgctcaaagaagagactaggtcttcggctgctgctgctgcagacacccaagatgaggcaactggcgctgaggaggagcttctgccaggggtggatgtactcctggaggtgttccctacctgttcggtggagcaggcccagtgggtgctggccaaagctcggggggacttggaagaagctgtgcagatgctggtagagggaaaggaagaggggcctgcagcctgggagggccccaaccaggacctgcccagacgcctcagaggcccccaaaaggatgagctgaagtccttcatcctgcagaagtacatgatggtggatagcgcagaggatcagaagattcaccggcccatggctcccaaggaggcccccaagaagctgatccgatacatcgacaacc

SEQ ID NO: 603 - DNA, 836 bp, Homo sapiens
gcgccggggccgggcggccggcgcccccggctgctcccgccgccgcccggacccgcgccccgccggggcagcggtggtgagagccccgactccccggacgccgcccgccgtgccatggggttcccggccgcggcgctgctctgcgcgctgtgctgcggcctcctggccccggctgcccgcgccggctactccgaggagcgctgcagctggaggggcagcggcctcacccaggagcccggcagcgtggggcagctggccctggcctgtgcggagggcgcggttgagtggctgtacccggctggggcgctgcgcctgaccctgggcggccccgatcccagagcgcggcccggcatcgcctgtctgcggccggtgcggcccttcgcgggcgcccaggtcttcgcggagcgcgcagggggcgccctggagctgctgctggccgagggcccgggcccggcagggggccgctgcgtgcgctggggtccccgcgagcgccgggccctcttcctgcaggccacgccgcaccaggacatcagccgccgcgtggccgccttccgctttgagctgcgcgaggacgggcgccccgagctgcccccgcaggcccacggtctcggcgtagacggtgcctgcaggccctgcagcgacgctgagctgctcctggccgcatgcaccagcgacttcgtaattcacgggatcatccatggggtcacccatgacgtggagctgcaggagtctgtcatcactgtggtggccgcccgtgtcctccgccagacaccgccgctgttccaggcggggcgatccggggaccaggggctgacctccattcgtaccccactgcg

SEQ ID NO: 604 - DNA, 916 bp, Homo sapiens
  misc_feature (455)..(455): n is a, c, g, or t
  misc_feature (571)..(571): n is a, c, g, or t
  misc_feature (577)..(577): n is a, c, g, or t
  misc_feature (599)..(599): n is a, c, g, or t
  misc_feature (622)..(622): n is a, c, g, or t
  misc_feature (631)..(631): n is a, c, g, or t
  misc_feature (638)..(638): n is a, c, g, or t
  misc_feature (650)..(650): n is a, c, g, or t
  misc_feature (661)..(661): n is a, c, g, or t
  misc_feature (680)..(680): n is a, c, g, or t
  misc_feature (703)..(703): n is a, c, g, or t
  misc_feature (711)..(711): n is a, c, g, or t
  misc_feature (720)..(720): n is a, c, g, or t
  misc_feature (729)..(729): n is a, c, g, or t
  misc_feature (731)..(731): n is a, c, g, or t
  misc_feature (748)..(748): n is a, c, g, or t
  misc_feature (753)..(753): n is a, c, g, or t
  misc_feature (770)..(771): n is a, c, g, or t
  misc_feature (784)..(784): n is a, c, g, or t
  misc_feature (790)..(790): n is a, c, g, or t
  misc_feature (817)..(817): n is a, c, g, or t
  misc_feature (833)..(833): n is a, c, g, or t
  misc_feature (838)..(839): n is a, c, g, or t
  misc_feature (844)..(844): n is a, c, g, or t
  misc_feature (851)..(851): n is a, c, g, or t
  misc_feature (858)..(858): n is a, c, g, or t
  misc_feature (861)..(862): n is a, c, g, or t
  misc_feature (870)..(870): n is a, c, g, or t
  misc_feature (878)..(879): n is a, c, g, or t
  misc_feature (882)..(882): n is a, c, g, or t
  misc_feature (888)..(890): n is a, c, g, or t
  misc_feature (904)..(904): n is a, c, g, or t
  misc_feature (906)..(906): n is a, c, g, or t
  misc_feature (909)..(909): n is a, c, g, or t
  misc_feature (916)..(916): n is a, c, g, or t
gggtcacggcaatcaaccccctgctgtggttcccgaaccccaaggcccgatgggtcccgcgggggtcgcggcgaggccagggcgctttttcggcgtctacctgctctactgcctgaacccccggtaccggggccgcgtctacgtggggttcactgtcaacactgctcgtcgggtccagcagcacaatgggggccgcaaaaaaggcggggcctggcggaccagcgggcgagggccctgggagatggtgctcgtcgtgcacggcttcccgtcctccgtggccgcccttcggtttgagtgggcttggcagcacccgcacgcctcgcgccgcctggcgcacgtggggcctcgcctgcgaggagagacagccttcgctttccacctgcgcgtgctggcgcacatgctgcgcgcaccgccctgggctcgcctcccgctcacgctgcgctgggtgcgcccanacctccgccaggacctctgcctcccgccgccgccgcacgtgcctctggccttcgggcctccaccgccccaggccccggccccaaggcgccgcgcaggtccctttgatgacgcggancctganccagaccagggggatccagggncctgctgctccctgtgcgcccanaccatccangatgaanaggggcccttgngttgcccccancctggctgcctgctaaggncccatgtgatctgcctgaaagangaattttnttcaagaanaaccagganancttctgcccctaaaggnccaangcccttgctgtgaaaanncactgtttttggnaaaacntgatttggttgtgccaaatggacattnaaaaagaaataaaaanactcnnaattnaaaaagncacactngannaaacttgntgaaaacnnatnctcaannnccttaccccctccnanctnctttttn

SEQ ID NO: 605 - DNA, 1167 bp, Homo sapiens
  misc_feature (735)..(735): n is a, c, g, or t
  misc_feature (884)..(884): n is a, c, g, or t
  misc_feature (905)..(905): n is a, c, g, or t
  misc_feature (923)..(923): n is a, c, g, or t
  misc_feature (934)..(934): n is a, c, g, or t
  misc_feature (937)..(937): n is a, c, g, or t
  misc_feature (941)..(941): n is a, c, g, or t
  misc_feature (952)..(952): n is a, c, g, or t
  misc_feature (955)..(955): n is a, c, g, or t
  misc_feature (960)..(960): n is a, c, g, or t
  misc_feature (967)..(967): n is a, c, g, or t
  misc_feature (981)..(981): n is a, c, g, or t
  misc_feature (997)..(997): n is a, c, g, or t
  misc_feature (1006)..(1006): n is a, c, g, or t
  misc_feature (1010)..(1010): n is a, c, g, or t
  misc_feature (1019)..(1019): n is a, c, g, or t
  misc_feature (1031)..(1031): n is a, c, g, or t
  misc_feature (1035)..(1035): n is a, c, g, or t
  misc_feature (1039)..(1039): n is a, c, g, or t
  misc_feature (1052)..(1052): n is a, c, g, or t
  misc_feature (1056)..(1056): n is a, c, g, or t
  misc_feature (1069)..(1069): n is a, c, g, or t
  misc_feature (1074)..(1074): n is a, c, g, or t
  misc_feature (1089)..(1089): n is a, c, g, or t
  misc_feature (1091)..(1091): n is a, c, g, or t
  misc_feature (1094)..(1094): n is a, c, g, or t
  misc_feature (1110)..(1110): n is a, c, g, or t
  misc_feature (1113)..(1113): n is a, c, g, or t
  misc_feature (1126)..(1126): n is a, c, g, or t
  misc_feature (1132)..(1134): n is a, c, g, or t
  misc_feature (1140)..(1140): n is a, c, g, or t
  misc_feature (1142)..(1142): n is a, c, g, or t
  misc_feature (1153)..(1155): n is a, c, g, or t
  misc_feature (1159)..(1159): n is a, c, g, or t
  misc_feature (1164)..(1165): n is a, c, g, or t
gggcgatgctggaggttcgctagccgaagcggctgcatctggcgccgcgtctgccccgcgtgctcggagcggattctgcccgccgtccccggagccctcggcgccccgctgagcccgcgatcacttcctccctgtgaccaaccggcgctgcaggttagagcctggcaatgccgtttgggtgtgtgactctgggtgacaagaagaactataaccagccatcggaggtgactgacagatatgatttgggacaggtcatcaagactgaggagttttgtgaaatcttccgggccaaggacaagacgacaggcaagctgcacacctgcaagaagttccagaagcgggacggccgcaaggtgcggaaagctgccaagaacgagataggcatcctcaagatggtgaagcatcccaacatcctacagctggtggatgtgtttgtgacccgcaaggagtactttatcttcctggagctggccacggggagggaggtgtttgactggatcctggaccagggctactactcggagcgagacacaagcaacgtggtacggcaagtcctggaggccgtggcctatttgcactcactcaagatcgtgcacaggaatctcaagctggagaacctggtttactacaaccggctgaagaactcgaagattgtcatcagtgacttccatctggctaagctagaaaatggcctcatcaaggagccctgtgggacccccgagtatctggccccanaggtggtaggccggcagcggtatggacgccctgtggactgctgggccattggagtcatcatgtacatcctgctttcaggcaacccacctttctatgaggaggtggaagaagatgattatgagaaccatgataagaatctcttccgcaanatcctggctggtgactatgantttgactctcatattggnatgaaatttcncangcanccaaaacctgntcncaagnctgatgnagtgaacaaaacancgaatcctgcaaaaangcctctccntgantggatttcnggcatgctgctncganaaanatcagaatgggtntgtnccaattaaaaaantttcnggccaatgaaaaagntntcnaagaccccttaaaagntcnggacaaaaatcanagggtnnncccatngnccaccaaaaannncccngggtnngg

SEQ ID NO: 606 - DNA, 666 bp, Homo sapiens
  misc_feature (244)..(244): n is a, c, g, or t
  misc_feature (354)..(354): n is a, c, g, or t
  misc_feature (377)..(377): n is a, c, g, or t
  misc_feature (390)..(390): n is a, c, g, or t
  misc_feature (401)..(402): n is a, c, g, or t
  misc_feature (416)..(416): n is a, c, g, or t
  misc_feature (428)..(428): n is a, c, g, or t
  misc_feature (437)..(437): n is a, c, g, or t
  misc_feature (452)..(452): n is a, c, g, or t
  misc_feature (460)..(460): n is a, c, g, or t
  misc_feature (473)..(474): n is a, c, g, or t
  misc_feature (478)..(478): n is a, c, g, or t
  misc_feature (491)..(491): n is a, c, g, or t
  misc_feature (504)..(504): n is a, c, g, or t
  misc_feature (519)..(519): n is a, c, g, or t
  misc_feature (525)..(525): n is a, c, g, or t
  misc_feature (529)..(529): n is a, c, g, or t
  misc_feature (535)..(535): n is a, c, g, or t
  misc_feature (537)..(537): n is a, c, g, or t
  misc_feature (541)..(541): n is a, c, g, or t
  misc_feature (545)..(545): n is a, c, g, or t
  misc_feature (555)..(555): n is a, c, g, or t
  misc_feature (560)..(560): n is a, c, g, or t
  misc_feature (567)..(567): n is a, c, g, or t
  misc_feature (571)..(571): n is a, c, g, or t
  misc_feature (587)..(587): n is a, c, g, or t
  misc_feature (592)..(592): n is a, c, g, or t
  misc_feature (606)..(606): n is a, c, g, or t
  misc_feature (609)..(610): n is a, c, g, or t
  misc_feature (615)..(615): n is a, c, g, or t
  misc_feature (621)..(621): n is a, c, g, or t
  misc_feature (643)..(643): n is a, c, g, or t
  misc_feature (647)..(647): n is a, c, g, or t
  misc_feature (651)..(651): n is a, c, g, or t
  misc_feature (659)..(659): n is a, c, g, or t
  misc_feature (662)..(663): n is a, c, g, or t
  misc_feature (666)..(666): n is a, c, g, or t
ggttctatccgccgcctccaccttccatccggcgccggctttcggcgcgacggtcgccgcgttccatcgtcgcgcggcccttcgggcgcccgagcccgcaatgtcgggccccaacggagacctggggatgccggtggaggcgggagcggaaggcgaggaggacggcttcggggaagcagaatacgctgccatcaactccatgctggaccagatcaactcctgtctggaccacctggaggagaanaatgaccacctccacgcccgcctccaggagctgctggagtccaaccggcaaacacgcctggagttccagcagcagctcggggaggcccccagtgatgccaacccctaggntccaaggagcccccaaccggganccaaccctgcctncctgggctagnntctggcctgggcantcaccccctggnttaaacacnttctcaagggctggncttcaagnacccctggagggnntgcntgccctgggccancctttctgccttngggctcccccttggncctaancatngggcancncccnaccntctggaatgnccctncctgggnaccnaaaaatggggccttgncaaanccaacccaatttgnctnncccancccaanttcttgggggcttcccccattnttgncaantgcctttnaanngtn

SEQ ID NO: 607 - DNA, 899 bp, Homo sapiens
  misc_feature (721)..(721): n is a, c, g, or t
  misc_feature (724)..(724): n is a, c, g, or t
  misc_feature (728)..(728): n is a, c, g, or t
  misc_feature (731)..(731): n is a, c, g, or t
  misc_feature (740)..(740): n is a, c, g, or t
  misc_feature (756)..(756): n is a, c, g, or t
  misc_feature (759)..(759): n is a, c, g, or t
  misc_feature (775)..(775): n is a, c, g, or t
  misc_feature (781)..(781): n is a, c, g, or t
  misc_feature (787)..(787): n is a, c, g, or t
  misc_feature (819)..(819): n is a, c, g, or t
  misc_feature (840)..(840): n is a, c, g, or t
  misc_feature (844)..(844): n is a, c, g, or t
  misc_feature (855)..(855): n is a, c, g, or t
  misc_feature (857)..(857): n is a, c, g, or t
  misc_feature (859)..(860): n is a, c, g, or t
  misc_feature (862)..(863): n is a, c, g, or t
  misc_feature (871)..(871): n is a, c, g, or t
  misc_feature (888)..(888): n is a, c, g, or t
  misc_feature (891)..(891): n is a, c, g, or t
  misc_feature (894)..(894): n is a, c, g, or t
  misc_feature (896)..(896): n is a, c, g, or t
ggcaaaaacttcgaccgagagattggccacaataaccccagtgccatggcagtggagtcattcacggcaacagccccctttgtccaaattggcaggtttttcctctcgtcaggcctcatcgacaaagtcgacaacttcaagtccctgagcctatccaagctggaggaccctcatgtggacatcattcgccgtggagactttttctaccacagcgaaaatcccaagtatccagaggtgggagacttgcgtgtctccttttcctatgctggactgagcggcgatgaccctgacctgggcccagctcacgtggtcactgtgattgcccggcagcggggtgaccagctagtcccattctccaccaagtctggggataccttactgctcctgcaccacggggacttctcagcagaggaggtgtttcatagagaactaaggagcaactccatgaagacctggggcctgcgggcagctggctggatggccatgttcatgggcctcaaccttatgacacggatcctctacaccttggtggactggtttcctgttttccgagacctggtcaacattggcctgaaagcctttgccttctgtgtggccacctcgctgaccctgctgaccgtggcggctggctggctcttctaccgacccctgtgggcccctcctcattgccggcctggccccttgtgcccatccttgttgctcggaacacgggtgccagccnaanaagntgnagtgaaaanacccttggcaccccgnccnaaaacctggcgtgaanccctangaatcnaggtcccttctcttcacctcctgaccccagtnccatgccaaaccaggaacccncggntcaattttggnantnngnnaccccctnctcctttttctgggggnaanaantngca

SEQ ID NO: 608 - DNA, 1091 bp, Homo sapiens
  misc_feature (881)..(881): n is a, c, g, or t
  misc_feature (884)..(884): n is a, c, g, or t
  misc_feature (890)..(890): n is a, c, g, or t
  misc_feature (892)..(892): n is a, c, g, or t
  misc_feature (909)..(909): n is a, c, g, or t
  misc_feature (914)..(914): n is a, c, g, or t
  misc_feature (934)..(934): n is a, c, g, or t
  misc_feature (952)..(952): n is a, c, g, or t
  misc_feature (954)..(954): n is a, c, g, or t
  misc_feature (967)..(967): n is a, c, g, or t
  misc_feature (1000)..(1000): n is a, c, g, or t
  misc_feature (1009)..(1009): n is a, c, g, or t
  misc_feature (1018)..(1018): n is a, c, g, or t
  misc_feature (1031)..(1031): n is a, c, g, or t
  misc_feature (1035)..(1035): n is a, c, g, or t
  misc_feature (1052)..(1052): n is a, c, g, or t
  misc_feature (1057)..(1057): n is a, c, g, or t
  misc_feature (1060)..(1061): n is a, c, g, or t
  misc_feature (1065)..(1066): n is a, c, g, or t
  misc_feature (1070)..(1072): n is a, c, g, or t
  misc_feature (1078)..(1078): n is a, c, g, or t
  misc_feature (1082)..(1082): n is a, c, g, or t
gccctgcgcggcatggaggggacggccgtggccgtgttcgagattttgagatttttaataattcactggaagtgtgacatagatgtatcaaagggagcattgctagaagggcagctagtgatttccatagaaggattaaattctaagcaccaggcaaatgctcttcattgtgtaacaactattgcttctgcaggaagcctttttggtggcatggtcctcaagaagttcctaaaagttccagctcccaaactccagacatcttaggaagggttttatgcttctggattttcctttcctcctgaatttcatcactcaggaaatcaatcaaagctttgtctccttcgcacgccacacccacagccggaggtgcagggcccgcgaggccgcagggggcccggccgcagaacacgcgcgcaaactgagcagcctgaagggcgggcgcacagccggggcgccggccaggagctgccggaaaggcggggcgggccccgggggtgtggaagccggcgacgcagaagcccagcatatggggcactcagcgcagcagtggcagcatggcggagaggactgcgaacatgtgcggatgcaaaggacaacccaggcctagagacagtctcaaactcctgggctcaagtgattctcctgcctcagcctcccaaattgctgggattacagacttgagccactgcacccagccttctccatgtctttagggacaaacttctaggatgaaatttaggatgaattaagtcattagcttgacaccatgatgtacaaatccctgaatttcagtttcattgttaaaatgccattgtttcaagatgctcagttggctatggaaagataggtcatctatcccagctactcagggggatcttttngancccaanangtcaaggctacagtganctgcnatcacagcactgcactctancccgggcaacaaagtganantgtctccaaaaanaaaataaaaatttatatgggaaaaaaaaccccnaaaaacccncccctattnaaaaaaaaagtcngggnatgggcctacctgactncaaanttnnaaannctannnaatttncccnagggaatta

SEQ ID NO: 609 - DNA, 947 bp, Homo sapiens
  misc_feature (719)..(719): n is a, c, g, or t
  misc_feature (727)..(727): n is a, c, g, or t
  misc_feature (764)..(764): n is a, c, g, or t
  misc_feature (789)..(789): n is a, c, g, or t
  misc_feature (792)..(792): n is a, c, g, or t
  misc_feature (822)..(822): n is a, c, g, or t
  misc_feature (824)..(824): n is a, c, g, or t
  misc_feature (844)..(844): n is a, c, g, or t
  misc_feature (848)..(848): n is a, c, g, or t
  misc_feature (852)..(852): n is a, c, g, or t
  misc_feature (886)..(886): n is a, c, g, or t
  misc_feature (888)..(888): n is a, c, g, or t
  misc_feature (890)..(890): n is a, c, g, or t
  misc_feature (892)..(892): n is a, c, g, or t
  misc_feature (895)..(897): n is a, c, g, or t
  misc_feature (901)..(901): n is a, c, g, or t
  misc_feature (904)..(906): n is a, c, g, or t
  misc_feature (915)..(915): n is a, c, g, or t
  misc_feature (920)..(920): n is a, c, g, or t
  misc_feature (926)..(926): n is a, c, g, or t
  misc_feature (929)..(929): n is a, c, g, or t
  misc_feature (941)..(942): n is a, c, g, or t
gagcgcacccacactggcgagcggccctacaaatgtccccgttgcggcaaggccttcgccgacagctcttacctgcttcgccaccagcgcactcactctggccagaagccctacaagtgcccacattgtggcaaggccttcggcgacagctcctacctcctgcgacaccagcgcacccacagccacgagcggccctacagctgcaccgagtgcggcaagtgctatagccagaactcgtccctgcgcagccatcagagggtgcacaccggtcagaggcccttcagctgtggcatctgcggcaagagcttctcccagcggtcggcccttatcccccatgcccgcagccacgcccgggagaagcccttcaagtgccctgagtgcggcaagcgctttggccagagctcggtgctggccatccacgcccgcacccacctgccaggccgcacctacagctgccccgactgcggcaagaccttcaatcgctcctccactctcatccagcaccagcgctcccacacgggcgagcggccctacaggtgcgccgtgtgcggcaagggcttctgccgctcctccacgcttctgcagcatcaccgggtccacagtggcgagcggccttacaagtgcgatgactgcggaaaggccttctcccagagctccgacctcatccgccaccagcggacccacgcggcggggccggcgctgacctggggccccagcangggtgggnaggtgtgggcaaaaaaataaggggccagggaagctanaggaactttagggaggatagtgganaanccccaggaaaatggagaactgaggatgctngnaaaaaaaaaacaaggtggangaantgantgccctggaaaacttgtgggaattgggttggaangnangncannncggnaannnggaaggccntgggnaaaaanggnaaaaaaagtcanngaagg

SEQ ID NO: 610 - DNA, 926 bp, Homo sapiens
  misc_feature (651)..(651): n is a, c, g, or t
  misc_feature (805)..(805): n is a, c, g, or t
  misc_feature (818)..(818): n is a, c, g, or t
  misc_feature (826)..(826): n is a, c, g, or t
  misc_feature (829)..(829): n is a, c, g, or t
  misc_feature (836)..(836): n is a, c, g, or t
  misc_feature (860)..(860): n is a, c, g, or t
  misc_feature (870)..(870): n is a, c, g, or t
  misc_feature (876)..(878): n is a, c, g, or t
  misc_feature (881)..(881): n is a, c, g, or t
  misc_feature (896)..(896): n is a, c, g, or t
  misc_feature (902)..(903): n is a, c, g, or t
  misc_feature (905)..(905): n is a, c, g, or t
  misc_feature (907)..(908): n is a, c, g, or t
  misc_feature (916)..(916): n is a, c, g, or t
ggctgggcgccggccgcgccagccacggcctgcggcgcccgcggcaccatgatctccaccaaggagaagaacaagatcccgaaggacagcatgacgcttctgccctgcttctacttcgtggagctgcccatagtggcttcttccatcgtatccttgtacttcctggagctgaccgacctcttcaagccggccaaggtgggcttccagtgctatgaccgcactctctccatgccctacgtggagaccaacgaggagctcatcccgctgctgatgctgctcagcttggccttcgcggcccctgccgcctcgatcatggtggccgagggcatgttgtactgtctgcagtcccggctgtggggccgtgccggggggcccgccggggcggagggcagcatcaacgccggcggctgcaacttcaactccttcctgcggcgtacggtgcggtttgtgggtgtccacgtgttcggcctgtgtgccacagccctggtgacggacgtgatccagctggccacgggttaccacactcccttcttcctcaccgtctgcaagcccaactacactctcctgggcacgtcctgcgaggtcaacccctacatcacgcaggacatctgctccggccacgacatccacgccatcctgtctgcacggaanaccttcccgtcccagcacgccacgctgtcagccttcgccgcggtctatgtgtcgatgtacttcaactcggtcatctcggacaccaccaaagctgctgaagcccatcctggtcttcgccttttgccatcgccgcggggcgtaatgcggggctcancaaaatcacgcantaacgcanccncccttgnggacgtgtaatgccgggcttcctnatcggggggngggaannnctngcctaacttgggccntgccanncngnngggaaacntccaaggccc

SEQ ID NO: 611 - DNA, 987 bp, Homo sapiens
  misc_feature (721)..(721): n is a, c, g, or t
  misc_feature (751)..(751): n is a, c, g, or t
  misc_feature (775)..(775): n is a, c, g, or t
  misc_feature (792)..(792): n is a, c, g, or t
  misc_feature (797)..(797): n is a, c, g, or t
  misc_feature (800)..(800): n is a, c, g, or t
  misc_feature (822)..(822): n is a, c, g, or t
  misc_feature (838)..(838): n is a, c, g, or t
  misc_feature (841)..(841): n is a, c, g, or t
  misc_feature (844)..(844): n is a, c, g, or t
  misc_feature (848)..(848): n is a, c, g, or t
  misc_feature (851)..(851): n is a, c, g, or t
  misc_feature (857)..(857): n is a, c, g, or t
  misc_feature (863)..(863): n is a, c, g, or t
  misc_feature (865)..(865): n is a, c, g, or t
  misc_feature (872)..(872): n is a, c, g, or t
  misc_feature (879)..(879): n is a, c, g, or t
  misc_feature (881)..(881): n is a, c, g, or t
  misc_feature (884)..(884): n is a, c, g, or t
  misc_feature (892)..(892): n is a, c, g, or t
  misc_feature (913)..(913): n is a, c, g, or t
  misc_feature (921)..(922): n is a, c, g, or t
  misc_feature (932)..(932): n is a, c, g, or t
  misc_feature (955)..(955): n is a, c, g, or t
  misc_feature (962)..(963): n is a, c, g, or t
  misc_feature (975)..(975): n is a, c, g, or t
  misc_feature (978)..(978): n is a, c, g, or t
  misc_feature (981)..(981): n is a, c, g, or t
  misc_feature (983)..(983): n is a, c, g, or t
  misc_feature (986)..(986): n is a, c, g, or t
gtcacggtgctggaccagcacctgaggcccccagcccgccgacccggaaccacaacgccggcccgtgttgatctacagcagcaaattatgaccattatagatgaactgggcaaggcttctgccaaggcccagaatctttccgctcctatcactagtgcatcaaggatgcagagtaaccgccatgttgtttatattctcaaagacagttcagcccgaccggctggaaaaggagccattattggtttcatcaaagttggatacaagaagctctttgtactggatgatcgtgaggctcataatgaggtagaaccactttgcatcctggacttttacatccatgagtctgtgcaacgccatggccatgggcgagaactcttccagtatatgttgcagaaggagcgagtggaaccgcaccaactggcaattgaccgaccctcacagaagctgctgaaattcctgaataagcactacaatctggagaccacagtcccacaggtgaacaactttgtgatctttgaaggcttctttgcccatcaacatcctccagcaaggaagctgccacccaagagagcagagggagacatcaagccatactcctctagtgaccgagaatttctgaaggtagctgtggagcctccttggcccctaaacagggcccctcgccgcgccacacctccagcccacccacccccccgctccagcagcctgggaaactcaccanaacgaggtcccctccgcccctttgtgccanaacaggagctgctgcgttccttgngcctctgccccccaaancctancgnccgccttctgttggctgctgancctgggggcagcccanctnaangtcntcncaccancttccntncccgctntgaaganantcnaaactaanagctaccctctccctggcctnggaaaacnngggggggggnagggaacccttcctgaaaacctnaaacccnntctttccttggntcntgnanganc

SEQ ID NO: 612 - DNA, 903 bp, Homo sapiens
  misc_feature (638)..(638): n is a, c, g, or t
  misc_feature (649)..(649): n is a, c, g, or t
  misc_feature (677)..(677): n is a, c, g, or t
  misc_feature (700)..(700): n is a, c, g, or t
  misc_feature (746)..(746): n is a, c, g, or t
  misc_feature (762)..(762): n is a, c, g, or t
  misc_feature (780)..(780): n is a, c, g, or t
  misc_feature (800)..(800): n is a, c, g, or t
  misc_feature (806)..(806): n is a, c, g, or t
  misc_feature (814)..(814): n is a, c, g, or t
  misc_feature (822)..(822): n is a, c, g, or t
  misc_feature (832)..(832): n is a, c, g, or t
  misc_feature (841)..(841): n is a, c, g, or t
  misc_feature (844)..(844): n is a, c, g, or t
  misc_feature (848)..(848): n is a, c, g, or t
  misc_feature (853)..(853): n is a, c, g, or t
  misc_feature (866)..(866): n is a, c, g, or t
  misc_feature (871)..(871): n is a, c, g, or t
  misc_feature (873)..(873): n is a, c, g, or t
  misc_feature (877)..(877): n is a, c, g, or t
  misc_feature (886)..(886): n is a, c, g, or t
  misc_feature (888)..(888): n is a, c, g, or t
  misc_feature (890)..(890): n is a, c, g, or t
  misc_feature (892)..(892): n is a, c, g, or t
  misc_feature (895)..(895): n is a, c, g, or t
  misc_feature (897)..(897): n is a, c, g, or t
  misc_feature (902)..(902): n is a, c, g, or t
gcaccccgcctgggcatctgcctggactatgagcggggccgggtttccttcctggatgctgtttccttccgtgggctcttggagtgccccctggactgctcagggcctgtgtgccctgccttttgcttcatcgggggtggcgcagtacagctccaggagccagtgggcactaagcctgagaggaaagtcaccattgggggcttcgccaagctggactgagccttccaggcccctcatgcagacctggggtcctcctgggccctggcccccaaacctcttggcacccggttgttaccccctggcagcttctcccccaaactctcctaccatgtggccctgctccttctcccgtgtctgtcttcccacagttttctcttgacccaggggctctcttctgcccacctctctggatggcccccgttctctccattgcttgttagccaggcccccacccccactgagtctgccctatgacctgcctttggcatgttacccaagccatggagagagccccttctccatccctgtcctgtgccccccaggctgattgggagggagggcacctggaacactgggcatgatctccagctctgcccttgccctgccaagctccctgccctgttgatgctgaactacanccttgggacangcaggctttggggctggacgctgtccangcattcctggtgaggggaagggnaccctgtcatcctgctttatttatttggggtcccaacaccccgcanccgcatgccccttaangtccctcttctccctctngcatgctttaacctgttccnaaaccnatgccaangtgccaangtctcccttngggaaccanctnaatntgggngttcccattgggnttggncnaagnaaaggcctntngngnccnantgccna

SEQ ID NO: 613 - DNA, 1102 bp, Homo sapiens
  misc_feature (749)..(749): n is a, c, g, or t
  misc_feature (813)..(813): n is a, c, g, or t
  misc_feature (831)..(831): n is a, c, g, or t
  misc_feature (856)..(856): n is a, c, g, or t
  misc_feature (889)..(889): n is a, c, g, or t
  misc_feature (893)..(893): n is a, c, g, or t
  misc_feature (900)..(900): n is a, c, g, or t
  misc_feature (947)..(947): n is a, c, g, or t
  misc_feature (959)..(959): n is a, c, g, or t
  misc_feature (966)..(966): n is a, c, g, or t
  misc_feature (977)..(977): n is a, c, g, or t
  misc_feature (986)..(986): n is a, c, g, or t
  misc_feature (989)..(989): n is a, c, g, or t
  misc_feature (1004)..(1004): n is a, c, g, or t
  misc_feature (1009)..(1010): n is a, c, g, or t
  misc_feature (1024)..(1024): n is a, c, g, or t
  misc_feature (1031)..(1031): n is a, c, g, or t
  misc_feature (1034)..(1034): n is a, c, g, or t
  misc_feature (1038)..(1040): n is a, c, g, or t
  misc_feature (1054)..(1054): n is a, c, g, or t
  misc_feature (1063)..(1063): n is a, c, g, or t
  misc_feature (1065)..(1065): n is a, c, g, or t
  misc_feature (1068)..(1068): n is a, c, g, or t
  misc_feature (1070)..(1070): n is a, c, g, or t
  misc_feature (1085)..(1085): n is a, c, g, or t
  misc_feature (1090)..(1090): n is a, c, g, or t
  misc_feature (1094)..(1094): n is a, c, g, or t
  misc_feature (1097)..(1097): n is a, c, g, or t
  misc_feature (1099)..(1100): n is a, c, g, or t
  misc_feature (1102)..(1102): n is a, c, g, or t
gcctgggctgaatttcctgggcacttctcagtggaactctctagcctcctggttcggaatgtcaactatgagatcccctcactgaagaagcagattgccaagtgccagcagctgcagcaagaatacagccgcaaggaggaggagtgccaggcaggggctgccgagatgcgggagcagttctaccactcctgcaagcagtatggcatcacgggcgaaaatgtccgaggagaactgctggccctggtgaaggacctgccgagtcagctggctgagattggggcagcggctcagcagtccctgggggaagccattgacgtgtaccaggcgtctgtggggtttgtgtgtgagaggtagagaggcctcagcttctcctggtgggggtgctttgcctgtgttccccagctcatgacccttctccagttgtcttgttcccatataacatttgaactctttacacacctgaacctgtgggggccttgcccatttgaccatgtggcccaggccaaagcccagtgttggccttacgcatggtcggcaggagagtcagttgtgtgctctgttgaagccccacagagcaggtgttgccaatgctgcggttcgtgcagaagcggggaaactcaacggtgtacgagtggaggacagggacagagccctctgtggtggaacgaccccacctcgaggagcttcctgagcaggtggcagaagatgcgattgactggggcgactttggggtaaaggcagtgtctgangggactgactctggcatctctgccgaggctgctggaatcgactggggcatcttcccggaatcanattcaaaggatcctggangtgatgggataaactggggaaaacnatgctgttgctttgcaaatcacagtgctggaancagnaaccagnctccaaaaggtgttgccaggggcccaaatgccctgacactgcttganaccctgaaaccngaatcantccttgatganctcatgganctngaaatctcttacccnaaaannatgaatttaatgangagcaantcntttnnnaaccattcactggnccaccatcngnggncnaacaaaaaaaaaagntaccngggnccngnngn

SEQ ID NO: 614 - DNA, 931 bp, Homo sapiens
  misc_feature (583)..(583): n is a, c, g, or t
  misc_feature (589)..(589): n is a, c, g, or t
  misc_feature (634)..(634): n is a, c, g, or t
  misc_feature (702)..(702): n is a, c, g, or t
  misc_feature (714)..(714): n is a, c, g, or t
  misc_feature (718)..(718): n is a, c, g, or t
  misc_feature (723)..(723): n is a, c, g, or t
  misc_feature (738)..(738): n is a, c, g, or t
  misc_feature (745)..(745): n is a, c, g, or t
  misc_feature (758)..(759): n is a, c, g, or t
  misc_feature (771)..(771): n is a, c, g, or t
  misc_feature (775)..(775): n is a, c, g, or t
  misc_feature (788)..(788): n is a, c, g, or t
  misc_feature (800)..(801): n is a, c, g, or t
  misc_feature (813)..(813): n is a, c, g, or t
  misc_feature (817)..(817): n is a, c, g, or t
  misc_feature (822)..(822): n is a, c, g, or t
  misc_feature (841)..(841): n is a, c, g, or t
  misc_feature (844)..(844): n is a, c, g, or t
  misc_feature (847)..(847): n is a, c, g, or t
  misc_feature (868)..(869): n is a, c, g, or t
  misc_feature (877)..(878): n is a, c, g, or t
  misc_feature (882)..(882): n is a, c, g, or t
  misc_feature (896)..(896): n is a, c, g, or t
  misc_feature (911)..(913): n is a, c, g, or t
  misc_feature (917)..(931): n is a, c, g, or t
gcccacgcgtccgcccacgcgtccgatcaggtgaagctgactctagactcagaggaagaaggacccctggaggaatgcttggcctacctgactgcccgtttgccccagggatcgctggtcccctacatgcccaacgctgtggagcaggccagtgaggctgtatacaaactcgctgaatcagggtcttctttggggaaaaaggtggcaggtgccctacagaccattgagacctccctggctcagtacagcctcacccagctctgtgtgggcttcaacgggggcaaagactgcactgccctcctgcacctcttccatgcagctgtgcagaggaaattacctgatgttccaaaccccctccagatcctgtatatccgcagcatctcccctttccctgagctggaacagtttctacaggacactatcaagaggtataatctgcagatgttggaagctgagggcagcatgaagcaggccctgggtgaactgcaggcacggcacccccagctggaggctgtccttatgggcacccgccggactgacccctactcctgtagcctctgccctttcagccccactgacccangctggnccgcattcatgcgcatcaacccactgctggactggacctacaganacatctgggattttctgcgtcagctgtttgtcccatactgtatcctgtatgaccgaagatacacatcnctggggaagtcngganaatancgtggggaacccggncctgaantgcctgaacccannaagaaaccccanatancgtccagcctatntactgggaaaannaaaaaaaaagancggnaaatnccccccaatgacctccccnccntangaggggggggaaagaaacccnncctaaggnnaaanctgggaaaaaaacngggcctctccctggnnnaaannnnnnnnnnnnnnn

SEQ ID NO: 615 - DNA, 1088 bp, Homo sapiens
  misc_feature (597)..(597): n is a, c, g, or t
  misc_feature (651)..(651): n is a, c, g, or t
  misc_feature (758)..(758): n is a, c, g, or t
  misc_feature (805)..(805): n is a, c, g, or t
  misc_feature (816)..(816): n is a, c, g, or t
  misc_feature (847)..(847): n is a, c, g, or t
  misc_feature (889)..(889): n is a, c, g, or t
  misc_feature (919)..(919): n is a, c, g, or t
  misc_feature (931)..(931): n is a, c, g, or t
  misc_feature (934)..(934): n is a, c, g, or t
  misc_feature (941)..(941): n is a, c, g, or t
  misc_feature (943)..(943): n is a, c, g, or t
  misc_feature (947)..(947): n is a, c, g, or t
  misc_feature (952)..(952): n is a, c, g, or t
  misc_feature (956)..(956): n is a, c, g, or t
  misc_feature (965)..(965): n is a, c, g, or t
  misc_feature (975)..(976): n is a, c, g, or t
  misc_feature (983)..(983): n is a, c, g, or t
  misc_feature (1007)..(1007): n is a, c, g, or t
  misc_feature (1012)..(1012): n is a, c, g, or t
  misc_feature (1019)..(1019): n is a, c, g, or t
  misc_feature (1028)..(1028): n is a, c, g, or t
  misc_feature (1030)..(1030): n is a, c, g, or t
  misc_feature (1034)..(1034): n is a, c, g, or t
  misc_feature (1042)..(1042): n is a, c, g, or t
  misc_feature (1044)..(1044): n is a, c, g, or t
  misc_feature (1051)..(1051): n is a, c, g, or t
  misc_feature (1066)..(1066): n is a, c, g, or t
  misc_feature (1069)..(1069): n is a, c, g, or t
  misc_feature (1072)..(1072): n is a, c, g, or t
  misc_feature (1077)..(1077): n is a, c, g, or t
  misc_feature (1080)..(1080): n is a, c, g, or t
  misc_feature (1086)..(1086): n is a, c, g, or t
gcaggatcggacgtgctacccctcccggtcccggccctggcccagccagcccagccctcgaggctcgatgcctgtgccaaggccaggggcagccagagggcagctggatggccacgtgcaggggtcaaggctgggccctgcagtggggcgggccgccagccccagcagtttacagacgcatggctcttcctcccagagcagccggcagctacctggaccggaaatgtcctcatcccctccctggggccaggctctgccctggccttcctctgtgaacccctcctttctttgtgctggtgtctgggaccaaaaagggggaatatgggagggcagagtggggaggggagtccatgggcctggggccccaagccggggcgtctgagctccccaggcatgaccaaacctcagtggaggggcctctgcttcaggccccgcctggctgacattctgagcccccctcggaggccccgccacagccaacctgcccagtctttcctctgggcttgacccgccaggggagttctccaggcctagggccaggagagaggccctggcaccctggcgtgggtgcccgccaaacgccctgcgaccgctcanaagcacaaatgctgtccatggccgtgaggctgcctgccaggtgaatggacatancgtgagaggcggtgaggccagggcttccagcctcgtgctgtctcgggactcctgaccgtggtgtgcgtgtgtgcccgtctgtgactttctactcaccaaggttgaanaaaggaaacggggaaaatcaaaaggggttcaaaccccacctcaatangtggaggggancgcctgccattggttgtatttttgttctganttttcggtgccgtgttcctaactactccatcccatgacctcnccacacctactggggcatctggctggtgcntgctgccatggncancccccantntcancttgnaaangggtcttgnacccccaagnncaaaacntctttggaaaaaaaagggtggccntgggnaaaaaangaagaaccnangggnttactttntnaaaatgnttcccaaaaggaatncantancccanggncccccnat

SEQ ID NO: 616 - DNA, 1089 bp, Homo sapiens
  misc_feature (835)..(835): n is a, c, g, or t
  misc_feature (850)..(850): n is a, c, g, or t
  misc_feature (857)..(857): n is a, c, g, or t
  misc_feature (867)..(867): n is a, c, g, or t
  misc_feature (874)..(874): n is a, c, g, or t
  misc_feature (885)..(885): n is a, c, g, or t
  misc_feature (929)..(929): n is a, c, g, or t
  misc_feature (943)..(943): n is a, c, g, or t
  misc_feature (951)..(951): n is a, c, g, or t
  misc_feature (957)..(957): n is a, c, g, or t
  misc_feature (982)..(982): n is a, c, g, or t
  misc_feature (992)..(992): n is a, c, g, or t
  misc_feature (999)..(1000): n is a, c, g, or t
  misc_feature (1002)..(1002): n is a, c, g, or t
  misc_feature (1008)..(1008): n is a, c, g, or t
  misc_feature (1013)..(1014): n is a, c, g, or t
  misc_feature (1020)..(1020): n is a, c, g, or t
  misc_feature (1029)..(1029): n is a, c, g, or t
  misc_feature (1036)..(1036): n is a, c, g, or t
  misc_feature (1047)..(1047): n is a, c, g, or t
  misc_feature (1049)..(1049): n is a, c, g, or t
  misc_feature (1068)..(1068): n is a, c, g, or t
  misc_feature (1070)..(1070): n is a, c, g, or t
  misc_feature (1072)..(1072): n is a, c, g, or t
  misc_feature (1078)..(1078): n is a, c, g, or t
ggccgctgctcgcgggctgagtgtctgtcgctgctgccgcctccacccagcctccgccatggacctcttcggggacctgccggagcccgagcgctcgccgcgcccggctgccgggaaagaagctcagaaaggacccctgctctttgatgacctccctccggccagcagtactgactcaggatcagggggacctttgctttttgatgatctcccacccgctagcagtggcgattcaggttctcttgccacatcaatatcccagatggtaaagactgaagggaaaggagcaaagagaaaaacctccgaggaagagaagaatggcagtgaagagcttgtggaaaagaaagtttgttaagcctcttcggtgatctttggtctgaagggctatgtggctgagcggaagggtgagagggaggagatgcaggatgcccacgtcatcctgaacgacatcaccgaggagtgtaggcccccatcgtccctcattactcgggtttcatattttgctgtttttgatggacatggaggaattcgagcctcaaaatttgctgcacagaatttgcatcaaaacttaatcagaaaatttcctaaaggagatgtaatcagtgtagagaaaaccgtgaagagatgccttttggacactttcaagcatactgatgaagagttccttaaacaagcttccagccagaagcctgcctggaaagatgggtccactgccacgtgtgttctggctgtagacaacattctttatattgccaacctcggagatagtcgggcaatcttgtgtcgttataatgaggagagtcaaaaacatgcagccttaagcctcagcaaagancataatccaactcantatgaanagcggatgangataccnaaggctggagnaaacgtcagggatgggcgtgttttgggccgtgctaaaggtgtcncgctccattggggnacgggcantacaanccctgcggggtcacctctgtgcccnaaatcaaaanctgccanntnaccccnatgannggttcnttttttggnctgggangggcttttcangnctttaccccaaaaaaaccngnantttttnttgtctttttc

SEQ ID NO: 617 - DNA, 1081 bp, Homo sapiens
  misc_feature (798)..(798): n is a, c, g, or t
  misc_feature (832)..(832): n is a, c, g, or t
  misc_feature (857)..(857): n is a, c, g, or t
  misc_feature (873)..(873): n is a, c, g, or t
  misc_feature (929)..(929): n is a, c, g, or t
  misc_feature (933)..(933): n is a, c, g, or t
  misc_feature (952)..(952): n is a, c, g, or t
  misc_feature (967)..(967): n is a, c, g, or t
  misc_feature (969)..(969): n is a, c, g, or t
  misc_feature (984)..(984): n is a, c, g, or t
  misc_feature (998)..(998): n is a, c, g, or t
  misc_feature (1000)..(1000): n is a, c, g, or t
  misc_feature (1003)..(1003): n is a, c, g, or t
  misc_feature (1005)..(1005): n is a, c, g, or t
  misc_feature (1011)..(1011): n is a, c, g, or t
  misc_feature (1013)..(1013): n is a, c, g, or t
  misc_feature (1015)..(1015): n is a, c, g, or t
  misc_feature (1019)..(1019): n is a, c, g, or t
  misc_feature (1030)..(1030): n is a, c, g, or t
  misc_feature (1034)..(1034): n is a, c, g, or t
  misc_feature (1042)..(1042): n is a, c, g, or t
  misc_feature (1051)..(1052): n is a, c, g, or t
  misc_feature (1055)..(1055): n is a, c, g, or t
  misc_feature (1058)..(1058): n is a, c, g, or t
  misc_feature (1062)..(1062): n is a, c, g, or t
  misc_feature (1078)..(1078): n is a, c, g, or t
  misc_feature (1081)..(1081): n is a, c, g, or t
gggcaaaaagcaattgcagaagttgatgtgggtacagataaggcccagaattctgacccgatacttgatacttcatcactagttcctggatgttcctctgtagataacatcaagtcatctcaaacctcacaaaaccagggacttggacgtcctactcttgaaggtgatgaagagacttcagaggttgagtacacagtgaataagggcccagcttccagcaatagagacagggtaccaccttcatctgaagctagtgagcatcacccgcggcatcgtgtttcaagtcaagcggaagatacttccagcagctttgacaacctgtttattgacaggttacagaggatcaccattgcggaccaaggtgaacaacagtcagaagaaaacgcaagtactaagaacttgacaggcctttccagtgggactgagaagaaacctcattacatggaagtgctagaaatgcgagccaaaaacccagtgccccagctgcgtaaatttaaaaccaatgtgttaccttttcgacaaaatgattcatctagtcattgccagaagagtgggtctcctatttcctcagaagagcggcggcgcagggataagcagcatcttgatgacatcacagcagctcggcttctaccacttcaccatatgcccacgcagctgctctccatagaagaatccttggcacttcagaaacagcagaaacagaattatgaggagatgcaagcaaagctcgcagcgcaaaaattagctgaaagactgaatattaaaatgcggagttataatccagaaggggagtcttcngggagataccgagaagtaagggatgaagatgacnattggtcctctgatgaattctgaanataatctcctaaatcnctgacgttgaaatgtcatcatcttacatcaaactttctaactagtatcagatcagngtcnaaattgttgagggaagtantttataaagttaccnanggtagtttaaaaaanccccatttgtcttncnaangngacttncngngctngaaaggttaantttngaaattgngtttacccnnggnatnaaantttgcaaaaattgggnatn

SEQ ID NO: 618 - DNA, 525 bp, Homo sapiens
  misc_feature (263)..(263): n is a, c, g, or t
  misc_feature (271)..(271): n is a, c, g, or t
  misc_feature (282)..(282): n is a, c, g, or t
  misc_feature (326)..(326): n is a, c, g, or t
  misc_feature (336)..(336): n is a, c, g, or t
  misc_feature (353)..(354): n is a, c, g, or t
  misc_feature (357)..(357): n is a, c, g, or t
  misc_feature (386)..(386): n is a, c, g, or t
  misc_feature (390)..(390): n is a, c, g, or t
  misc_feature (397)..(398): n is a, c, g, or t
  misc_feature (407)..(408): n is a, c, g, or t
  misc_feature (423)..(423): n is a, c, g, or t
  misc_feature (433)..(433): n is a, c, g, or t
  misc_feature (446)..(447): n is a, c, g, or t
  misc_feature (450)..(450): n is a, c, g, or t
  misc_feature (469)..(469): n is a, c, g, or t
  misc_feature (479)..(480): n is a, c, g, or t
  misc_feature (484)..(484): n is a, c, g, or t
  misc_feature (486)..(486): n is a, c, g, or t
  misc_feature (502)..(502): n is a, c, g, or t
  misc_feature (504)..(504): n is a, c, g, or t
  misc_feature (509)..(512): n is a, c, g, or t
  misc_feature (520)..(521): n is a, c, g, or t
  misc_feature (523)..(523): n is a, c, g, or t
gtgaataagtcgtcctacaaatatgaagcagacacggtggacctgaattggtgcgtcatttccgacatggaagtcatcgagctgaacaaatgcacctcgggccaatcctttgaagtcatcctgaagccaccctcctttgatggggttcccgagttcaacgcctccctgccaaggcggcgagacccatccctggaagagatccagaagaaactagaagcggctgaggagcgaaggaagtaccaggaagcggagctcctgaaccncttagcanagaaacgggancatgagagagagtgatccaaaggccattgaggaaaacacaactncttcagatgntaaagaaaaactggccnnaanatggattccaccaggaaacgggaggcccnctcnccccctnnttgaaacgnngcaaaaaaggaaaanccccccaagnggggggaaaaaannggncctttaaggaaaaaggccncccggttaanncctnanggcccaaaaaattttncnggttnnnnggggaaanntncc

SEQ ID NO: 619 - DNA, 789 bp, Homo sapiens
  misc_feature (588)..(588): n is a, c, g, or t
  misc_feature (591)..(591): n is a, c, g, or t
  misc_feature (599)..(599): n is a, c, g, or t
  misc_feature (611)..(611): n is a, c, g, or t
  misc_feature (620)..(620): n is a, c, g, or t
  misc_feature (637)..(637): n is a, c, g, or t
  misc_feature (669)..(669): n is a, c, g, or t
  misc_feature (675)..(675): n is a, c, g, or t
  misc_feature (679)..(680): n is a, c, g, or t
  misc_feature (683)..(684): n is a, c, g, or t
  misc_feature (697)..(697): n is a, c, g, or t
  misc_feature (705)..(705): n is a, c, g, or t
  misc_feature (720)..(720): n is a, c, g, or t
  misc_feature (729)..(729): n is a, c, g, or t
  misc_feature (756)..(756): n is a, c, g, or t
  misc_feature (758)..(758): n is a, c, g, or t
  misc_feature (761)..(762): n is a, c, g, or t
  misc_feature (767)..(767): n is a, c, g, or t
  misc_feature (770)..(770): n is a, c, g, or t
  misc_feature (783)..(783): n is a, c, g, or t
  misc_feature (785)..(786): n is a, c, g, or t
ggggaaagatggcggcgactctgggaccccttgggtcgtggcagcagtggcggcgatgtttgtcggctcgggatgggtccaggatgttactccttcttcttttgttggggtctgggcaggggccacagcaagtcggggcgggtcaaacgttcgagtacttgaaacgggagcactcgctgtcgaagccctaccagggtgtgggcacaggcagttcctcactgtggaatctgatgggcaatgccatggtgatgacccagtatatccgccttaccccagatatgcaaagtaaacagggtgccttgtggaaccgggtgctgcattgtcttccttgaggtatggcgacaagaagtgaatgcagtattcctggtgtggctgcactgtgattttgtacaagtccatgtttcctgagagactgggagttgcaggtgcacttcaaaatccatggacaaggaaagaagaatctgcatggggatggcttggcaatctggtacacaaaggatcggatgcagccagggcctgtgtttggaaacatggacaaaatttgtgggctgggaataatttgtagacacctaccccaatgaagagaancancaagaagncccaaaaaagcnatattctcnagaatccagcggtaatncccctaaatctcaaccatggtgaaaacggctnccccanctannatnntgaacgggaaggncggcctanaaaactgggaagctnccaaccatntccccaattttcttaaaaaactttccngngannccctnccnccaaaagcctttnannaaa

SEQ ID NO: 620 - DNA, 870 bp, Homo sapiens
gccggggtcgcgcgagagccgcaagcggagttggtgggcgctatgctatcacccgaggcagagcgagtgctgcggtaccttgtagaagtggaggagctcgccgaggaggtgctggcggacaagcggcagattgtggacctggacactaaaaggaatcagaatcgagagggcctgagggccctgcagaaggatctcagcctctctgaagatgtgatggtttgcttcgggaacatgtttatcaagatgcctcaccctgagacaaaggaaatgattgaaaaagatcaagatcatctggataaagaaatagaaaaactgcggaagcaacttaaagtgaaggtcaaccgcctttttgaggcccaaggcaaaccggagctgaagggttttaacttgaaccccctcaaccaggatgagcttaaagctctcaaggtcatcttgaaaggatgagactcaagaaccaagatgggggaccagcaaccccccagggtcatggaggacccaggaccctccaaccttgacacctgtaaggacaggatctgccctgtaaggggccagccgtcaggaatctggccatgaaaacctctttgtagtgcttggctactctgtgatggcaggagggaaccttcagcctgtctggctgctggacctggacaccagggctcggtggacacaagatctattgacgggccttggtagccaccagtgggtgtgtggggcagtggctgtgggggtgtaagaatgactgcaacaggcacttcccaacaatggcctgctgttcacatggaccctgagcaaggaaaggagggagggaggggcagagtggagtgtcattccagcattcctctcagaagggagagaggttttcaggctggt

SEQ ID NO: 621 - DNA, 1089 bp, Homo sapiens
  misc_feature (747)..(747): n is a, c, g, or t
  misc_feature (790)..(790): n is a, c, g, or t
  misc_feature (810)..(810): n is a, c, g, or t
  misc_feature (841)..(841): n is a, c, g, or t
  misc_feature (854)..(854): n is a, c, g, or t
  misc_feature (856)..(856): n is a, c, g, or t
  misc_feature (864)..(864): n is a, c, g, or t
  misc_feature (878)..(878): n is a, c, g, or t
  misc_feature (884)..(884): n is a, c, g, or t
  misc_feature (892)..(892): n is a, c, g, or t
  misc_feature (894)..(894): n is a, c, g, or t
  misc_feature (939)..(939): n is a, c, g, or t
  misc_feature (950)..(950): n is a, c, g, or t
  misc_feature (966)..(966): n is a, c, g, or t
  misc_feature (968)..(968): n is a, c, g, or t
  misc_feature (970)..(972): n is a, c, g, or t
  misc_feature (982)..(982): n is a, c, g, or t
  misc_feature (986)..(986): n is a, c, g, or t
  misc_feature (994)..(994): n is a, c, g, or t
  misc_feature (1000)..(1000): n is a, c, g, or t
  misc_feature (1006)..(1006): n is a, c, g, or t
  misc_feature (1011)..(1011): n is a, c, g, or t
  misc_feature (1015)..(1016): n is a, c, g, or t
  misc_feature (1024)..(1024): n is a, c, g, or t
  misc_feature (1037)..(1037): n is a, c, g, or t
  misc_feature (1040)..(1041): n is a, c, g, or t
  misc_feature (1047)..(1047): n is a, c, g, or t
  misc_feature (1051)..(1051): n is a, c, g, or t
  misc_feature (1055)..(1055): n is a, c, g, or t
  misc_feature (1057)..(1057): n is a, c, g, or t
  misc_feature (1072)..(1072): n is a, c, g, or t
  misc_feature (1074)..(1074): n is a, c, g, or t
  misc_feature (1079)..(1079): n is a, c, g, or t
  misc_feature (1082)..(1082): n is a, c, g, or t
ggcgcgcacttccgggcacggtcagggcgtgacgtcgggaggagggcagacacgccgctttttggatgcctcctatgcctggcgggagtcttgtctgagctggcaccaccacacggcccacgacatcttcgcagggaagcctgtggaccctctgccaggctccacaagaggtcaggacagtgcagtgtgttcacaaggccagtttctgatcgtccgccccgaggctgaggaccagtaggcagctcccaagatgggtgaaaggaaaggggtcaacaagtactatcctccagacttcaaccctgagaagcatggctctctcaaccgataccacaacagccacccgcttcgggagcgggctcggaagctgtcacagggcatcctcatcatccgattcgaaatgccatataacatctggtgcgatggctgcaagaaccacatcggcatgggtgttcgttacaatgcagaaaagaagaaggtgggcaattactacacaaccccgatctacaggttccggatgaaatgccacctctgtgtcaactacatcgagatgcagacggaccccgccaactgcgactacgtgatcgtgagtggcgcccagcgcaaggaggagcgctgggacatggcggacaatgagcaggtgctgaccacaggtgagcgccacccacttacctgcctgggggccctggccctgagtctgcgctggggcccccaaagcccagccgagctctgatcgttgcagagcatganaagaagcaaaaagctggaaacggacgccatgttccggctggancatggcgaagccgaccgcancacactcaaaaaggcgctgccccacactgancccacattccagnangcccaaancgcctggaaggacnacttcnccctcaanancatgctgcggaaaaaggttccgggaaaaaaaaaaaagcccttccnggaaggaggangaaaaaaaaaccaggncntnnnaggccaaggngaancctgaacnatcccnctgggngcccnaaanngaaaaaanaccccaagctggnggnnctgctnaaanttcncncccctggaactcctncnagganaancaaaaaa

SEQ ID NO: 622 - DNA, 1022 bp, Homo sapiens
  misc_feature (728)..(728): n is a, c, g, or t
  misc_feature (784)..(784): n is a, c, g, or t
  misc_feature (797)..(797): n is a, c, g, or t
  misc_feature (799)..(799): n is a, c, g, or t
  misc_feature (805)..(805): n is a, c, g, or t
  misc_feature (817)..(817): n is a, c, g, or t
  misc_feature (829)..(829): n is a, c, g, or t
  misc_feature (835)..(835): n is a, c, g, or t
  misc_feature (873)..(873): n is a, c, g, or t
  misc_feature (880)..(880): n is a, c, g, or t
  misc_feature (892)..(892): n is a, c, g, or t
  misc_feature (905)..(905): n is a, c, g, or t
  misc_feature (913)..(913): n is a, c, g, or t
  misc_feature (918)..(918): n is a, c, g, or t
  misc_feature (938)..(938): n is a, c, g, or t
  misc_feature (955)..(955): n is a, c, g, or t
  misc_feature (959)..(959): n is a, c, g, or t
  misc_feature (964)..(964): n is a, c, g, or t
  misc_feature (974)..(974): n is a, c, g, or t
  misc_feature (976)..(976): n is a, c, g, or t
  misc_feature (980)..(981): n is a, c, g, or t
  misc_feature (984)..(984): n is a, c, g, or t
  misc_feature (995)..(995): n is a, c, g, or t
  misc_feature (997)..(997): n is a, c, g, or t
  misc_feature (1000)..(1001): n is a, c, g, or t
  misc_feature (1006)..(1006): n is a, c, g, or t
  misc_feature (1017)..(1017): n is a, c, g, or t
  misc_feature (1019)..(1019): n is a, c, g, or t
gcccacgcgtccgctgaagaagaaattcaggaaatctgcttaaagatcttgcagctttatgctcggaaaaaggttgatctcacacacctggagggtgaagtggaaaaaagaaagcacgctatcgaagaggcaaaggcccaagcccggggcctgttgcctgggggcacacaggtgctggatggtacctcggggttctctcctgcccccaagctggtggaatcccccaaagaaggtaaagggagcaagccttccccactgtctgtgaagaacaccaagaggaggctggagggcgccaagaaagccaaggcggacagccccgtgaacggcttgccaaaggggcgagagagtcggagtcggagccggagccgtgagcagagctactcgaggtccccatcccgatcagcgtctcctaagaggaggaaaagtgacagcggctccacatctggtgggtccaagtcgcagagccgctcccggagcaggagtgactccccaccgagacaggccccccgcagcgctccctacaaaggctctgagattcggggctcccggaagtccaaggactgcaagtacccccagaagccacacaagtctcggagccggagttcttcccgttctcgaagcaggtcacgggagcgggcggataatccgggaaaatacaagaagaaaagtcattactacagagatcagcgacgagagcgctcgaggtcgtatgaacgcacaggccgtcnctatgagcgggaccaccctgggcacagcaggcatcggaagtgaggcggggttgcantgactggtggccncnagcccnttccctggggantaccctgatggntgcccnttgacccccgggggctgccctttgacccccgggtgggnctctcancgcaagtggtcntaaaaaaggattnttttttgnaaatntttgtccactggaccttggnggatttggaaatggaantgangggancggggaaccntncttnnaancggtctggggngnggnnccacncctgggcccgngnagg

SEQ ID NO: 623 - DNA, 1133 bp, Homo sapiens
  misc_feature (873)..(873): n is a, c, g, or t
  misc_feature (878)..(878): n is a, c, g, or t
  misc_feature (903)..(903): n is a, c, g, or t
  misc_feature (916)..(916): n is a, c, g, or t
  misc_feature (941)..(941): n is a, c, g, or t
  misc_feature (943)..(943): n is a, c, g, or t
  misc_feature (945)..(945): n is a, c, g, or t
  misc_feature (989)..(989): n is a, c, g, or t
  misc_feature (993)..(993): n is a, c, g, or t
  misc_feature (1003)..(1003): n is a, c, g, or t
  misc_feature (1006)..(1006): n is a, c, g, or t
  misc_feature (1008)..(1008): n is a, c, g, or t
  misc_feature (1010)..(1010): n is a, c, g, or t
  misc_feature (1013)..(1014): n is a, c, g, or t
  misc_feature (1017)..(1017): n is a, c, g, or t
  misc_feature (1026)..(1026): n is a, c, g, or t
  misc_feature (1048)..(1048): n is a, c, g, or t
  misc_feature (1053)..(1053): n is a, c, g, or t
  misc_feature (1062)..(1064): n is a, c, g, or t
  misc_feature (1074)..(1074): n is a, c, g, or t
  misc_feature (1077)..(1077): n is a, c, g, or t
  misc_feature (1084)..(1084): n is a, c, g, or t
  misc_feature (1089)..(1089): n is a, c, g, or t
  misc_feature (1104)..(1104): n is a, c, g, or t
  misc_feature (1108)..(1108): n is a, c, g, or t
  misc_feature (1110)..(1110): n is a, c, g, or t
  misc_feature (1122)..(1122): n is a, c, g, or t
  misc_feature (1124)..(1124): n is a, c, g, or t
  misc_feature (1130)..(1130): n is a, c, g, or t
gcggagcagagtcgactgggagcgaccgagcgggccgccgccgccgccatgaaccccgaatatgactacctgtttaagctgcttttgattggcgactcaggcgtgggcaagtcatgcctgctcctgcggtttgctgatgacacgtacacagagagctacatcagcaccatcggggtggacttcaagatccgaaccatcgagctggatggcaaaactatcaaacttcagatctgggacacagcgggccaggaacggttccggaccatcacttccagctactaccggggggctcatggcatcatcgtggtgtatgacgtcactgaccaggaatcctacgccaacgtgaagcagtggctgcaggagattgaccgctatgccagcgagaacgtcaataagctcctggtgggcaacaagagcgacctcaccaccaagaaggtggtggacaacaccacagccaaggagtttgcagactctctgggcatccccttcttggagacgagcgccaagaatgccaccaatgtcgagcaggcgttcatgaccatggctgctgaaatcaaaaagcggatggggcctggagcagcctctgggggcgagcggcccaatctcaagatcgacagcacccctgtaaagccggctggcggtggctgttgctaggaggggcacatggagtgggacaggagggggcaccttctccagatgatgtccctggagggggcaggaggtacctccctctccctctcctggggcatttgagtctgtggctttggggtgtcctgggctccccatctccttctggcccatctgcctgctgccctgagccccggttctgtcagggtccctaagggaggacactcagggcctgtggccaggcanggcgnaagcctgctgtgctgttgcctctangtgactttccaanatgcccccctacacacctttttttngnangagggctcttttgtcggtgtccctccccccccatgttgctgcangggntctctccttnttntncnggnnccngccaaaaantaaggtttccccggccttatgnctggntgcattcannnccagggcaanaantgggccnggganccagaactggaatcnaggncntgggtggacccngnaagggntgg

SEQ ID NO: 624 - DNA, 1046 bp, Homo sapiens
  misc_feature (677)..(677): n is a, c, g, or t
  misc_feature (779)..(779): n is a, c, g, or t
  misc_feature (796)..(796): n is a, c, g, or t
  misc_feature (802)..(802): n is a, c, g, or t
  misc_feature (810)..(810): n is a, c, g, or t
  misc_feature (823)..(823): n is a, c, g, or t
  misc_feature (825)..(825): n is a, c, g, or t
  misc_feature (838)..(838): n is a, c, g, or t
  misc_feature (848)..(848): n is a, c, g, or t
  misc_feature (852)..(852): n is a, c, g, or t
  misc_feature (854)..(854): n is a, c, g, or t
  misc_feature (860)..(860): n is a, c, g, or t
  misc_feature (880)..(880): n is a, c, g, or t
  misc_feature (884)..(884): n is a, c, g, or t
  misc_feature (899)..(899): n is a, c, g, or t
  misc_feature (916)..(917): n is a, c, g, or t
  misc_feature (924)..(924): n is a, c, g, or t
  misc_feature (962)..(963): n is a, c, g, or t
  misc_feature (976)..(976): n is a, c, g, or t
  misc_feature (985)..(985): n is a, c, g, or t
  misc_feature (989)..(989): n is a, c, g, or t
  misc_feature (991)..(991): n is a, c, g, or t
  misc_feature (998)..(998): n is a, c, g, or t
  misc_feature (1006)..(1006): n is a, c, g, or t
  misc_feature (1008)..(1008): n is a, c, g, or t
  misc_feature (1011)..(1011): n is a, c, g, or t
  misc_feature (1024)..(1024): n is a, c, g, or t
  misc_feature (1029)..(1029): n is a, c, g, or t
  misc_feature (1042)..(1042): n is a, c, g, or t
gaggccatgtacaggtcaatccgctggctggaccggtgcattgcagcccatcagcggccggacaagcagaacctcttcgccattatccagggtgggctggacgcagatctccgggccacctgccttgaagagatgaccaagcgagacgtgcctggcttcgccatcgggggcctgagcgggggtgagagcaagtcgcagttctggcggatggtggcgctgagcacctctcggctgccgaaggacaagccccgatatctgatgggggttgggtatgttgtggatagggaagccagagccctacctgtgggaagtggattcctggggaccccctaccctgcttggggaggtggcatttgggggaaacggacacaggtctgatctgaggagactaggaagacatggctgtcccttgggggccattctgagggaatatggcccagtctggggcagtgtgagggttgggaggggccctgggaagcccctgaggttctctgccccctcccgtcatggctgcaaccccagctatgccactgatctggtagtctgcgtggctcttggatgtgacatgttcgactgcgtcttccccacacggacagcgcgctttggctctgccctggtgcccactgggaacctgcagttgaggaagaaggtgtttgagaaggacttcggccccatanacccggagtgcacctgccccacgtgccaaaagcacagccgcgccttcctgcacgcactgctgcacagtgacaacacggccgcgctgcaccacctcacggtcnacaacatcgcctaccanctgcanctcatgancgccgtccgcacnancatcgtggaaaancgcttcccgnactncntgcggnacttcatgggcgccatgtangggnatcccaccctctgtnccacttgggccactgannctctggncctctgtgggaatcccactgggcttgacctggcattgnnaaaaggaaggaanaaagaaggnaggnanggcctgnaaaaaaantnaangattccttttttnaaagnttttttttttttnactt

SEQ ID NO: 625 - DNA, 951 bp, Homo sapiens
  misc_feature (834)..(850): n is a, c, g, or t
  misc_feature (860)..(860): n is a, c, g, or t
  misc_feature (883)..(883): n is a, c, g, or t
  misc_feature (888)..(888): n is a, c, g, or t
  misc_feature (926)..(927): n is a, c, g, or t
  misc_feature (948)..(948): n is a, c, g, or t
gacacggtcctcttctcgcacggcaatgccgtggacctgggccagatgagcagcttctacattggcctgggctcccgcctccactgcaacatcttctcctacgactactccggctacggtgccagctcgggcaggccttccgagaggaacctctatgccgacatcgacgccgcctggcaggccctgcgcaccaggtacggcatcagcccggacagcatcatcctgtacgggcagagcatcggcacggtgcccaccgtggacctggcctcgcgctacgagtgtgccgcggtggtgctgcactcgccgctcacctcgggcatgcgcgtcgccttccccgacaccaagaagacctactgcttcgacgccttccctaacatcgagaaggtgtccaagatcacgtctcccgtgctcatcatccacggcacggaggacgaggtgatcgacttctcgcacgggctggcgctctacgagcgctgccccaaggcggtggagccgctgtgggtggagggcgccgggcacaacgacatcgagctctacagccagtacctggagcgcctgcgtcgcttcatctcccaggagctgcccagccagcgcgcctagcggcggccccaaccggccggacctcagcaataaggcggcccccggacctcaccccgcgccggcccccacccaggggctgcatgtggaccccccgggcggcccaggggaaccccgccccgacccaggggctgtggacgatgtacaggcaacagagctacgcactcctttccttttggaagcaagaagaaaatacgtgaaaacggaaattaaagatttaaaattttaaaaaaaaannnnnnnnnnnnnnnnnaaaaaagggnggccgctccctatagtgagtcgnataancttaattaactgaacttggactcctgttgaaaatccannaatgacctcaaactcctctgnatt

SEQ ID NO: 626 - DNA, 692 bp, Homo sapiens
  misc_feature (16)..(16): n is a, c, g, or t
  misc_feature (260)..(260): n is a, c, g, or t
  misc_feature (361)..(361): n is a, c, g, or t
  misc_feature (400)..(400): n is a, c, g, or t
  misc_feature (420)..(420): n is a, c, g, or t
  misc_feature (431)..(431): n is a, c, g, or t
  misc_feature (433)..(433): n is a, c, g, or t
  misc_feature (446)..(446): n is a, c, g, or t
  misc_feature (449)..(449): n is a, c, g, or t
  misc_feature (459)..(459): n is a, c, g, or t
  misc_feature (468)..(468): n is a, c, g, or t
  misc_feature (495)..(496): n is a, c, g, or t
  misc_feature (512)..(512): n is a, c, g, or t
  misc_feature (522)..(522): n is a, c, g, or t
  misc_feature (524)..(525): n is a, c, g, or t
  misc_feature (539)..(539): n is a, c, g, or t
  misc_feature (544)..(544): n is a, c, g, or t
  misc_feature (546)..(546): n is a, c, g, or t
  misc_feature (548)..(548): n is a, c, g, or t
  misc_feature (575)..(575): n is a, c, g, or t
  misc_feature (581)..(581): n is a, c, g, or t
  misc_feature (583)..(583): n is a, c, g, or t
  misc_feature (593)..(593): n is a, c, g, or t
  misc_feature (604)..(605): n is a, c, g, or t
  misc_feature (621)..(621): n is a, c, g, or t
  misc_feature (626)..(626): n is a, c, g, or t
  misc_feature (630)..(630): n is a, c, g, or t
  misc_feature (634)..(635): n is a, c, g, or t
  misc_feature (637)..(637): n is a, c, g, or t
  misc_feature (647)..(647): n is a, c, g, or t
  misc_feature (656)..(657): n is a, c, g, or t
  misc_feature (660)..(660): n is a, c, g, or t
  misc_feature (668)..(669): n is a, c, g, or t
  misc_feature (672)..(674): n is a, c, g, or t
  misc_feature (677)..(677): n is a, c, g, or t
  misc_feature (683)..(683): n is a, c, g, or t
  misc_feature (687)..(688): n is a, c, g, or t
ggcttcaccaccgggnatgcaggcggcccggggggcctgggcctcccctcacatgctgcaagaccctccactgacttcacgcaagcggcagctgctgcagctgtggctgctgcggcagccactgccaccgccacagccacagccaccgtggctgctctccaggagaagcagagccaggagctgagccagtatggagcgatgggggccggacagtcttttaacagccagtttctgcagcatggaggtccccgggggcctantgtccccgctggcatgaaccctactggcataggaggggtaatgggcccctctggcctctcccccttggctatgaaccccacccgggcagcatgaatgacanccttgtatgcagggcagcgtctgccccaacatgggtatnctgggcctccccaggcccanccactgccccnanagggggtcaaganaanctactctgangtgtatccncgggcagcagtatctgcaaggaggccnntatgcacccagcaacncccagtttgngnncagccctgggcagnccccngncncctcccccttactaccctgggcacaanctgccncntgcaacatgncatgacccagnnccctgtccgtacctgnccccntcgnaganngncatttttaancctaacctnnttntattcttnnagnnnatncccagnttcnncaac

SEQ ID NO: 627 - DNA, 1082 bp, Homo sapiens
  misc_feature (739)..(739): n is a, c, g, or t
  misc_feature (764)..(764): n is a, c, g, or t
  misc_feature (794)..(794): n is a, c, g, or t
  misc_feature (800)..(800): n is a, c, g, or t
  misc_feature (809)..(809): n is a, c, g, or t
  misc_feature (812)..(812): n is a, c, g, or t
  misc_feature (815)..(815): n is a, c, g, or t
  misc_feature (820)..(820): n is a, c, g, or t
  misc_feature (827)..(827): n is a, c, g, or t
  misc_feature (835)..(835): n is a, c, g, or t
  misc_feature (856)..(856): n is a, c, g, or t
  misc_feature (863)..(863): n is a, c, g, or t
  misc_feature (893)..(893): n is a, c, g, or t
  misc_feature (895)..(895): n is a, c, g, or t
  misc_feature (897)..(897): n is a, c, g, or t
  misc_feature (913)..(913): n is a, c, g, or t
  misc_feature (917)..(917): n is a, c, g, or t
  misc_feature (926)..(926): n is a, c, g, or t
  misc_feature (932)..(932): n is a, c, g, or t
  misc_feature (935)..(935): n is a, c, g, or t
  misc_feature (965)..(965): n is a, c, g, or t
  misc_feature (985)..(985): n is a, c, g, or t
  misc_feature (1003)..(1003): n is a, c, g, or t
  misc_feature (1008)..(1008): n is a, c, g, or t
  misc_feature (1011)..(1011): n is a, c, g, or t
  misc_feature (1018)..(1018): n is a, c, g, or t
  misc_feature (1028)..(1029): n is a, c, g, or t
  misc_feature (1047)..(1048): n is a, c, g, or t
  misc_feature (1053)..(1053): n is a, c, g, or t
  misc_feature (1082)..(1082): n is a, c, g, or t
gcacacagggcgtgcaggccccagcgtggggaggaacgacattcgagtgcagctgctcgactatgtcatcagctccttttaccccgagatccaggctgctcatgccagcgacagcgtgcagagaaatgctgccttcttccgggaggtgacgcggcgcacggcgcggatggtggccgagtggcagtgtgtgggcttctgccacggcgtgctcaacaccgacaacatgagcatcctggggctcaccatcgactacgggccctttggcttcctggacaggtacgaccccgaccacgtgtgcaatgcctccgacaacaccggccgctacgcgtacagcaagcagcccgaggtgtgcaggtggaacctgcggaagctggccgaggccctgcagccggaactgcccctggagctgggggaggccatcctggccgaggagtttgacgccgagttccaaaggcactacctgcagaagatgcgcaggaagctgggcctcgtgcaggtggagctggaggaagacggggcgctggtgtccaagctcctggagaccatgcatctgaccggtgccgacttcacaaacaccttctacttgctgagctccttcccagtggagctagagtcgccaggcctggcggaattcctggccaggctgatggagcagtgtgcctccctggaggagctgaggctggccttccggccccagatggatccccggcagctatccatgatgctgatgctggcgcantcaaacccgcagctgttcgcgcttnatgggcacccgggcaggcatcgccaggganctggancgtgtggancancantctcngctggancacctgantgcggcaaaactgcaaaacangaaccanggccactgggctgactggctacaggcgtanananccccggctggacaagnactnggaaaggcnctgggnacnctgccccctggcaggctgaacacgtgcccntgaagcaccccaacaacccnaaatacgtgctgaagaantaatnccnccaaaangccatcaagnnttccaaaccggggaattnncaaangggcgggggggtttaaaaatattggaaan

SEQ ID NO: 628 - DNA, 942 bp, Homo sapiens
  misc_feature (599)..(599): n is a, c, g, or t
  misc_feature (750)..(750): n is a, c, g, or t
  misc_feature (788)..(790): n is a, c, g, or t
  misc_feature (797)..(797): n is a, c, g, or t
  misc_feature (815)..(815): n is a, c, g, or t
  misc_feature (827)..(827): n is a, c, g, or t
  misc_feature (829)..(829): n is a, c, g, or t
  misc_feature (839)..(839): n is a, c, g, or t
  misc_feature (844)..(844): n is a, c, g, or t
  misc_feature (850)..(851): n is a, c, g, or t
  misc_feature (872)..(872): n is a, c, g, or t
  misc_feature (881)..(881): n is a, c, g, or t
  misc_feature (893)..(893): n is a, c, g, or t
  misc_feature (895)..(895): n is a, c, g, or t
  misc_feature (899)..(899): n is a, c, g, or t
  misc_feature (916)..(917): n is a, c, g, or t
  misc_feature (920)..(920): n is a, c, g, or t
  misc_feature (922)..(937): n is a, c, g, or t
  misc_feature (939)..(942): n is a, c, g, or t
ggacggcgcccgccaggagcgccccccactcccaggccagcccaccccggcggaccgggccccgcgcgcccaggcgaggcactgggctccctctgctccccgtgggccgctccccgcgtggggccactgcccccggcccccgccatggtgcggatttcaaagcccaagacgtttcaggcctacttggatgattgtcaccggaggtatagctgtgcccactgccgcgctcacctggccaaccacgacgacctcatctccaagtccttccagggcagtcaggggcgtgcctacctcttcaactcagtggtgaacgtgggctgcgggccagccgaggagcgggtgctgctgaccggcctccatgctgtcgccgacatccactgcgagaactgcaagaccactttgggctggaaatatgaacaggcctttgagagcagccagaagtacaaagaggggaagtacatcattgaactcaaccacatgatcaaagacaacggctgggactgacccccgctcccccgacgcatgtggctccagcccggcctggccgccagggagcgccactggcttcccgccacccgaagggagctctggaccctcanagcccctgcagaggacggatctagctcctgtatatatattttattgcatgcactgtgaccttggggggagaacaaaagggggacgacgccccccgcacctcctgcgatctggctggcttggatctcgtttttaacccgtttctgccccacntgcccctatagttatggcctgtgttctggctctcctgnnnccagtgnacgtctgttctgtgaaantcctcccaccangncctttcttancccangcgtgnntgttccccctcgttttggaancgtttgtanattaaaaaaaanantggntgggagacaaaaaaaannaanannnnnnnnnnnnnnnnannnn

SEQ ID NO: 629 - DNA, 942 bp, Homo sapiens
  misc_feature (782)..(782): n is a, c, g, or t
  misc_feature (808)..(808): n is a, c, g, or t
  misc_feature (810)..(810): n is a, c, g, or t
  misc_feature (812)..(812): n is a, c, g, or t
  misc_feature (824)..(825): n is a, c, g, or t
  misc_feature (839)..(839): n is a, c, g, or t
  misc_feature (841)..(841): n is a, c, g, or t
  misc_feature (856)..(856): n is a, c, g, or t
  misc_feature (874)..(874): n is a, c, g, or t
  misc_feature (881)..(881): n is a, c, g, or t
  misc_feature (896)..(896): n is a, c, g, or t
  misc_feature (903)..(903): n is a, c, g, or t
  misc_feature (917)..(917): n is a, c, g, or t
  misc_feature (921)..(921): n is a, c, g, or t
  misc_feature (924)..(927): n is a, c, g, or t
  misc_feature (932)..(942): n is a, c, g, or t
gcgctccggggcggagctcgcgatagcgaccgggagcagggcgcggggcgggacccaggtccgaggcgaggaagccggaagccaggcgcggggagcctcccccttcgactgcagcctcgctccgtgccttctgcgcgcctgggatcccggagcctgcctaggttctgtgcgctcccgcccaggccggtgcccgccgcccgcctgcgccccaggcaggtcccaggcctccggctgctcccggccgaagccccgagtgcgagatcgagcgtcctgagcgcctgaccgcagccctggatcgcctgcggcagcgcggcctggaacagaggtgtctgcggttgtcagcccgcgaggcctcggaagaggagctgggcctggtgcacagcccagagtatgtatccctggtcagggagacccaggtcctaggcaaggaggagctgcaggcgctgtccggacagttcgacgccatctacttccacccgagtacctttcactgcgcgcggctggccgcaggggctggactgcagctggtggacgctgtgctcactggagctgtgcaaaatgggcttgccctggtgaggcctcccgggcaccatggccagagggcggctgccaacgggttctgcgtgttcaacaacgtggccatagcagctgcacatgccaagcagaaacacgggctacacaggatcctcgtcgtggactgggatgtgcaccatggccaggggatccagtatctctttgaggatgaccccagcgtcctttacttctcctggcaccgctatgancatgggcgcttctggcctttcctgcnanantcaaatgcaaanncagtggggcggggnanaggggcctcggcttnactgtcaacctgccctgnaaccagntgcccaccctcaagnccccagnttccccaaccaagncccnttnnnntgggnnnnnnnnnnn

SEQ ID NO: 630 - DNA, 486 bp, Homo sapiens
gggagaaggtctctgaaggagaaaagcaaagaagctcttttggcctcacaaaagccatttaaatttatagcaagggaggaacagaagcgagcagcccgggaaaagcagctgagagactttcttaagtataaaaagaaaacaaatcgatttaaagccagacccattcctcgatctacttatggttcaactaccaatgacaagttaaaagaagaagagctctatcgaaaccttaggacacagctgagagcccaggagcatttacagaactcatctcctctgccttgtaggtcagcttgcggatgcaggaaccccaggtgtcctgaacaggctgtaaagttgaagtgtaaacacaaggttaggtgcccaactcctgattttgaggaccttcctgagagataccagaaacacctctcagaacacaagtctccaaaactcttaacagtgtgtaaaccatttgatcttcatgcatctccacatgcatctatt

SEQ ID NO: 631 - DNA, 928 bp, Homo sapiens
  misc_feature (453)..(453): n is a, c, g, or t
  misc_feature (610)..(610): n is a, c, g, or t
  misc_feature (655)..(655): n is a, c, g, or t
  misc_feature (660)..(660): n is a, c, g, or t
  misc_feature (662)..(662): n is a, c, g, or t
  misc_feature (667)..(667): n is a, c, g, or t
  misc_feature (672)..(672): n is a, c, g, or t
  misc_feature (682)..(682): n is a, c, g, or t
  misc_feature (714)..(714): n is a, c, g, or t
  misc_feature (719)..(719): n is a, c, g, or t
  misc_feature (745)..(745): n is a, c, g, or t
  misc_feature (747)..(747): n is a, c, g, or t
  misc_feature (755)..(755): n is a, c, g, or t
  misc_feature (760)..(761): n is a, c, g, or t
  misc_feature (777)..(777): n is a, c, g, or t
  misc_feature (782)..(782): n is a, c, g, or t
  misc_feature (796)..(796): n is a, c, g, or t
  misc_feature (809)..(810): n is a, c, g, or t
  misc_feature (812)..(812): n is a, c, g, or t
  misc_feature (820)..(820): n is a, c, g, or t
  misc_feature (824)..(824): n is a, c, g, or t
  misc_feature (830)..(830): n is a, c, g, or t
  misc_feature (842)..(842): n is a, c, g, or t
  misc_feature (849)..(849): n is a, c, g, or t
  misc_feature (857)..(857): n is a, c, g, or t
  misc_feature (879)..(879): n is a, c, g, or t
  misc_feature (884)..(884): n is a, c, g, or t
  misc_feature (889)..(889): n is a, c, g, or t
  misc_feature (902)..(903): n is a, c, g, or t
  misc_feature (905)..(905): n is a, c, g, or t
  misc_feature (913)..(913): n is a, c, g, or t
  misc_feature (918)..(920): n is a, c, g, or t
  misc_feature (924)..(924): n is a, c, g, or t
gcttctgcatcttcgtctgcttcttcctcctccgtggtcttccccgggggtggcgccagtgcgccctccaacgccaacctggggctattggtgcaccgccggctgcaccctggcaccagctgcccgcgcctgtctccacccttgcacatggccccgggggcgggagagcaccacctggctcgccgggtgcgcagcgacccgggtggaggaggcctggcctacgccgcttatgccaacgggctgggggcacagctgcctggcttgcagccgtcggacacgtcgggctcctcctcttcgtccagctcctcctccagctcttcatcctcttcctccgggcttcggcgtaaaggcagccgcgactgctccgtgtgcttcgagagcgaagtgattgccgcgctggtgccctgtggccacaacctcttctgcatggagtgcgccaatcgcatctgtganaagagcgagcccgagtgcccggtctgccacaccgcggtcactcaggccatccgcatcttttcttaaaggcagcgggcgctgctagtgcgcaccgtgctgggggaagggggaacccctccccatcctctttccccagcgctcgcctgcctccctgggngccccccctctcccttctccttcccggccccaccaacactctganatccnanaggancttgnaaagctgtantatccgctcatttttaaaatttaatttttaantaaangaatttgccaagatatctgcatcaanantactgtancctgnnaaaacctgaacacctnaaatncatgctctataaanaataaggaacggnnanatttctantaantgaaantttttaaactgnacttaanaagaaacnttccaaaaaaaaaaaaaccccnaaaanttttncattttcttaaannangaaaaaangaacnnnaatnatta

SEQ ID NO: 632 - DNA, 1238 bp, Homo sapiens
  misc_feature (755)..(755): n is a, c, g, or t
  misc_feature (808)..(808): n is a, c, g, or t
  misc_feature (897)..(897): n is a, c, g, or t
  misc_feature (926)..(926): n is a, c, g, or t
  misc_feature (934)..(934): n is a, c, g, or t
  misc_feature (941)..(942): n is a, c, g, or t
  misc_feature (954)..(954): n is a, c, g, or t
  misc_feature (956)..(956): n is a, c, g, or t
  misc_feature (963)..(963): n is a, c, g, or t
  misc_feature (970)..(970): n is a, c, g, or t
  misc_feature (976)..(976): n is a, c, g, or t
  misc_feature (981)..(981): n is a, c, g, or t
  misc_feature (989)..(989): n is a, c, g, or t
  misc_feature (993)..(993): n is a, c, g, or t
  misc_feature (1005)..(1005): n is a, c, g, or t
  misc_feature (1010)..(1010): n is a, c, g, or t
  misc_feature (1016)..(1016): n is a, c, g, or t
  misc_feature (1029)..(1029): n is a, c, g, or t
  misc_feature (1035)..(1035): n is a, c, g, or t
  misc_feature (1041)..(1041): n is a, c, g, or t
  misc_feature (1068)..(1068): n is a, c, g, or t
  misc_feature (1074)..(1074): n is a, c, g, or t
  misc_feature (1086)..(1086): n is a, c, g, or t
  misc_feature (1088)..(1089): n is a, c, g, or t
  misc_feature (1094)..(1094): n is a, c, g, or t
  misc_feature (1101)..(1101): n is a, c, g, or t
  misc_feature (1109)..(1109): n is a, c, g, or t
  misc_feature (1112)..(1112): n is a, c, g, or t
  misc_feature (1119)..(1119): n is a, c, g, or t
  misc_feature (1122)..(1123): n is a, c, g, or t
  misc_feature (1129)..(1129): n is a, c, g, or t
  misc_feature (1139)..(1139): n is a, c, g, or t
  misc_feature (1145)..(1146): n is a, c, g, or t
  misc_feature (1149)..(1149): n is a, c, g, or t
  misc_feature (1152)..(1152): n is a, c, g, or t
  misc_feature (1159)..(1159): n is a, c, g, or t
  misc_feature (1173)..(1173): n is a, c, g, or t
  misc_feature (1186)..(1186): n is a, c, g, or t
  misc_feature (1195)..(1195): n is a, c, g, or t
  misc_feature (1199)..(1199): n is a, c, g, or t
  misc_feature (1213)..(1213): n is a, c, g, or t
  misc_feature (1216)..(1216): n is a, c, g, or t
  misc_feature (1224)..(1224): n is a, c, g, or t
  misc_feature (1235)..(1237): n is a, c, g, or t
ggggccgggcggtttggccccttagcgcccgggcgtcggggcggtaaaaggccggcagaagggaggcacttgagaaatgtctttcctccaggacccaagtttcttcaccatggggatgtggtccattggtgcaggagccctgggggctgctgccttggcattgctgcttgccaacacagacgtgtttctgtccaagccccagaaagcggccctggagtacctggaggatatagacctgaaaacactggagaaggaaccaaggactttcaaagcaaaggagctatgggaaaaaaatggagctgtgattatggccgtgcggaggccaggctgtttcctctgtcgagaggaagctgcggatctgtcctccctgaaaagcatgttggaccagctgggcgtccccctctatgcagtggtaaaggagcacatcaggactgaagtgaaggatttccagccttatttcaaaggagaaatcttcctggatgaaaagaaaaagttctatggtccacaaaggcggaagatgatgtttatgggatttatccgtctgggagtgtggtacaacttcttccgagcctggaacggaggcttctctggaaacctggaaggagaaggcttcatccttgggggagttttcgtggtgggatcaggaaagcagggcattcttcttgagcaccgagaaaaagaatttggagacaaagtaaacctactttctgttctggaagctgctaagatgatcaaaccacagactttggcctcanagaaaaaatgattgtgtgaaactgcccagctcagggataaccagggacattcncctgtgttcatgggatgtattgtttccactcgtgtcctaaggagtgaaaaacccatttatactctactctcagtatggattattaaggnatttaaaaatccggttaagccccctaagncaaaatanccccaannaaactgaaaaantntgaaaanttattgnggattnttaanctaaaacntggnaaaaggaggctnaaatnactgcnagctgggggcaanggcccnactgtnatccccccttttggaagccaagggaanaatccnttgaggcgggantnnaaacnccctaanaaatgggnaanccccttncannaaaaanaaaaaccccngggggnnggnggnccctgtntcccccccccgggngtgaggggaaacnttaccgggngggnggtggggaaaaacnccngtttcccngggggggactnnna

SEQ ID NO: 633 - DNA, 1166 bp, Homo sapiens
  misc_feature (754)..(754): n is a, c, g, or t
  misc_feature (775)..(775): n is a, c, g, or t
  misc_feature (796)..(796): n is a, c, g, or t
  misc_feature (814)..(814): n is a, c, g, or t
  misc_feature (824)..(824): n is a, c, g, or t
  misc_feature (826)..(826): n is a, c, g, or t
  misc_feature (866)..(866): n is a, c, g, or t
  misc_feature (873)..(873): n is a, c, g, or t
  misc_feature (875)..(875): n is a, c, g, or t
  misc_feature (894)..(894): n is a, c, g, or t
  misc_feature (898)..(898): n is a, c, g, or t
  misc_feature (901)..(901): n is a, c, g, or t
  misc_feature (915)..(915): n is a, c, g, or t
  misc_feature (925)..(925): n is a, c, g, or t
  misc_feature (935)..(937): n is a, c, g, or t
  misc_feature (939)..(939): n is a, c, g, or t
  misc_feature (954)..(954): n is a, c, g, or t
  misc_feature (965)..(965): n is a, c, g, or t
  misc_feature (969)..(969): n is a, c, g, or t
  misc_feature (971)..(971): n is a, c, g, or t
  misc_feature (980)..(980): n is a, c, g, or t
  misc_feature (989)..(989): n is a, c, g, or t
  misc_feature (993)..(993): n is a, c, g, or t
  misc_feature (998)..(998): n is a, c, g, or t
  misc_feature (1000)..(1000): n is a, c, g, or t
  misc_feature (1010)..(1010): n is a, c, g, or t
  misc_feature (1015)..(1015): n is a, c, g, or t
  misc_feature (1035)..(1036): n is a, c, g, or t
  misc_feature (1039)..(1039): n is a, c, g, or t
  misc_feature (1044)..(1044): n is a, c, g, or t
  misc_feature (1053)..(1054): n is a, c, g, or t
  misc_feature (1069)..(1069): n is a, c, g, or t
  misc_feature (1073)..(1073): n is a, c, g, or t
  misc_feature (1075)..(1075): n is a, c, g, or t
  misc_feature (1088)..(1088): n is a, c, g, or t
  misc_feature (1103)..(1103): n is a, c, g, or t
  misc_feature (1115)..(1115): n is a, c, g, or t
  misc_feature (1120)..(1120): n is a, c, g, or t
  misc_feature (1122)..(1122): n is a, c, g, or t
  misc_feature (1138)..(1139): n is a, c, g, or t
  misc_feature (1144)..(1144): n is a, c, g, or t
  misc_feature (1148)..(1148): n is a, c, g, or t
  misc_feature (1153)..(1153): n is a, c, g, or t
  misc_feature (1156)..(1156): n is a, c, g, or t
  misc_feature (1158)..(1158): n is a, c, g, or t
gccggcggccatggcggccgttctgaagccggtgctgctgggccttcgagatgcgccggtgcacggcagccccacagggccgggtgcctggactgctagcaagctgggcggcattccggatgctctgcccaccgtggctgcgcccaggcccgtgtgtcagcgctgcgggcagccgctcgctctggtcgtgcaggtgtattgcccgctggaaggctccccgtttcaccgtctgctgcacgtgttcgcgtgcgcctgccccggctgtagcaccggcggtgcgcgcagctggaaggtgttccgctcccagtgcctgcaggtgccagagagagaggcgcaggacgctcagaaacagggaaacagccttgcagctgaggactggtgtgaaggtgctgatgactggggaagtgatactgaggaggggccttcaccacagtttaccttggattttgggaatgatgccagcagtgccaaagacgtagactggactgctcggctccaagacctccgcctgcaggatgctgtcctgggtgctgcccatcctgtgcctcctgggctgccgctcttcctgccctactacatctgtgttgcagatgaggatgattacagggactttgtcaacctggatcatgcccacagccttctgagggactatcagcagagagaaggcattgccatggatcagttgctttcccaaagccttcctaatgatggtgatgaaaaatatgagaagaccataattaaaagtggagatcanacgttttacaaattcatgaancgaattgctgcttgtcaggancaaattttgaagtattcntggagtgaananccactctttttgacctgcccctacatcaaaaatcaccganctcccancntgcaaccagtgtggaggcnaaanganatttgaattttcancttatgccancactggtcannntnctcaaaaatgccaanttaagtctttntgtngnaatttgaanaattttaanttancaatntnaaaaaaattnctggnccccaaatcatcaaaatccnntgnaaaantttttattnnaaaaaaaaaccaaanaaantntttttaaaaaaanatttctttttaaaanaaataaaaaatntttantncaaaaaaaaaaaaggnnccccncccnaaggnccnanaaacttat

SEQ ID NO: 634 - DNA, 1091 bp, Homo sapiens
  misc_feature (783)..(783): n is a, c, g, or t
  misc_feature (792)..(792): n is a, c, g, or t
  misc_feature (807)..(807): n is a, c, g, or t
  misc_feature (855)..(855): n is a, c, g, or t
  misc_feature (865)..(865): n is a, c, g, or t
  misc_feature (891)..(891): n is a, c, g, or t
  misc_feature (898)..(898): n is a, c, g, or t
  misc_feature (923)..(923): n is a, c, g, or t
  misc_feature (935)..(935): n is a, c, g, or t
  misc_feature (947)..(947): n is a, c, g, or t
  misc_feature (954)..(954): n is a, c, g, or t
  misc_feature (968)..(968): n is a, c, g, or t
  misc_feature (984)..(984): n is a, c, g, or t
  misc_feature (991)..(991): n is a, c, g, or t
  misc_feature (999)..(999): n is a, c, g, or t
  misc_feature (1001)..(1003): n is a, c, g, or t
  misc_feature (1011)..(1011): n is a, c, g, or t
  misc_feature (1013)..(1013): n is a, c, g, or t
  misc_feature (1022)..(1022): n is a, c, g, or t
  misc_feature (1044)..(1044): n is a, c, g, or t
  misc_feature (1046)..(1046): n is a, c, g, or t
  misc_feature (1056)..(1056): n is a, c, g, or t
  misc_feature (1059)..(1059): n is a, c, g, or t
  misc_feature (1061)..(1061): n is a, c, g, or t
  misc_feature (1065)..(1065): n is a, c, g, or t
  misc_feature (1079)..(1079): n is a, c, g, or t
  misc_feature (1086)..(1087): n is a, c, g, or t
gcccacgcgtccggtccatggcggcgcttgacctgcgagcggagctggattcgctggtcctgcagctgcttggggacctggaggagctggaggggaaacgaacggtgttgaacgcccgggtggaggagggctggctctcgctcgccaaggctcgctacgcgatgggcgccaagtcggtagggcccctgcagtatgcttcccacatggagccccaggtctgcctccacgccagcgaggcccaggagggactccagaagttcaaggtggtgagagctggtgtccacgccccagaggaggtggggcctcgcgaagcaggtctgcggaggcgcaagggccccactaagaccccagaaccggagtcctctgaggcccctcaggaccccctgaactggtttggaatcctagttcctcacagtctacgtcaggctcaagcaagcttccgggatggcctgcagctggccgcagacatagccagcctccagaaccgcattgactggggtcgaagccagctccggggactccaagagaaactcaagcagctggagcctggggctgcctgacatgcgcgcaaagaggcagggcagcgagcacagctgttctccgacatggctacgtgatctcaggccttcttccttcacaattagctcttgcccctaccccacgccagctaatgccccttctgtgtccctgctctgcatgtttccattttccttaggtgtgaagtttgaagaggcaaacagtaattttgaaagccactactttgaaaccattctaaggcctganttcccatangacacactcacatangcaggtacacgttagtcaacaattggaactgcctcttggatcactcanctgtgctttncatggctggatgatgaacactgtgcnaaaaaanatgggggccaagaaaataacgcttncatgcttaatanatcctccaaatngtctttngctggagaaaaaancgtactccccccaaanatcgganaatatgantnnnttcccaangnaaacaaaancctgaataactgggcacccttngnagggtttaanccngnaaanaaaaatgattttgncctaaannttta

SEQ ID NO: 635 - DNA, 903 bp, Homo sapiens
  misc_feature (832)..(832): n is a, c, g, or t
  misc_feature (867)..(867): n is a, c, g, or t
  misc_feature (878)..(878): n is a, c, g, or t
  misc_feature (882)..(903): n is a, c, g, or t
gggggtaacaagatggcgaccgagacggtggagctccataagctaaagcttgccgaactaaagcaagaatgtcttgctcgtggtttggagaccaagggaataaagcaagatcttatccacagactccaggcatatcttgaagaacatgctgaagaggaggcaaatgaagaagatgtactgggagatgaaacagaggaagaagaaacaaagcccattgagctccctgtcaaagaggaagaaccccctgaaaaaactgttgatgtggcagcagagaagaaagtggtgaaaattacatctgaaataccacagactgagagaatgcagaagagggctgaacgattcaatgtacctgtgagcttggagagtaagaaagctgctcgggcagctaggtttgggatttcttcagttccaacaaaaggtctgtcatctgataacaaacctatggttaacttggataagctgaaggaaagagctcaaagatttggtttgaatgtctcttcaatctccagaaagtctgaagatgatgagaaactgaaaaagaggaaggagcgatttgggattgtcacaagttcagctggaactggaaccacagaggatacagaggcaaagaagaggaaaagagcagagcgctttgggattgcctgatgaaaagttcctgatactttctgttctccagtgttttccatttctctccttcttcttggtcacatatatgcctaaatgcacagtcatgtgcctacgtcctgcctcgcaatgagggagcatgtaccccaggtacatccatgaactgcggcagcagtttgacttattgctgtttcacctttaaggttgntggggttttggtttttgattatgttgcttggttantaaaaaaaaanttgnnnnnnnnnnnnnnnnnnnnnn

SEQ ID NO: 636 - DNA, 1055 bp, Homo sapiens
  misc_feature (748)..(748): n is a, c, g, or t
  misc_feature (762)..(762): n is a, c, g, or t
  misc_feature (780)..(780): n is a, c, g, or t
  misc_feature (785)..(785): n is a, c, g, or t
  misc_feature (809)..(809): n is a, c, g, or t
  misc_feature (814)..(814): n is a, c, g, or t
  misc_feature (830)..(830): n is a, c, g, or t
  misc_feature (854)..(854): n is a, c, g, or t
  misc_feature (857)..(857): n is a, c, g, or t
  misc_feature (862)..(862): n is a, c, g, or t
  misc_feature (879)..(879): n is a, c, g, or t
  misc_feature (890)..(890): n is a, c, g, or t
  misc_feature (908)..(909): n is a, c, g, or t
  misc_feature (917)..(917): n is a, c, g, or t
  misc_feature (924)..(924): n is a, c, g, or t
  misc_feature (927)..(927): n is a, c, g, or t
  misc_feature (930)..(930): n is a, c, g, or t
  misc_feature (940)..(940): n is a, c, g, or t
  misc_feature (942)..(942): n is a, c, g, or t
  misc_feature (949)..(949): n is a, c, g, or t
  misc_feature (959)..(959): n is a, c, g, or t
  misc_feature (966)..(966): n is a, c, g, or t
  misc_feature (971)..(971): n is a, c, g, or t
  misc_feature (976)..(976): n is a, c, g, or t
  misc_feature (979)..(979): n is a, c, g, or t
  misc_feature (983)..(983): n is a, c, g, or t
  misc_feature (989)..(989): n is a, c, g, or t
  misc_feature (995)..(995): n is a, c, g, or t
  misc_feature (1009)..(1009): n is a, c, g, or t
  misc_feature (1013)..(1013): n is a, c, g, or t
  misc_feature (1025)..(1025): n is a, c, g, or t
  misc_feature (1029)..(1030): n is a, c, g, or t
  misc_feature (1037)..(1037): n is a, c, g, or t
  misc_feature (1045)..(1045): n is a, c, g, or t
  misc_feature (1048)..(1048): n is a, c, g, or t
  misc_feature (1050)..(1050): n is a, c, g, or t
  misc_feature (1053)..(1053): n is a, c, g, or t
gcccacgcgtccgcccacgcgtccgatggcagcctgagcgaggagacccccgccggcccccccacctgctcagtgcccccagcctcagccctacccacacagcagtacgccaagtccctgcctgtgtctgtgcccgtctggggcttcaaggagaagaggacagaggcgcggtcatcagatgaggagaatgggccgccctcttcgcccgacctggaccgcatcgcggcgagcatgcgcgcgctggtgctgcgagaggccgaggacacccaggtcttcggggacctgccacggccgcggcttaacaccagcgacttccagaagctgaagcggaaatattgaagtccagggagggagcgccccgggccgcgtccgccccgtcccacactacgcccccgccccactcccggggcctgctaatctgaggccgatccgggaccggcctccttgcgtctcccattcccaagattgtcccgcctctgccaatccccgccgtccttccagcccacgacctgccgcgccgaggagcggcatctgtcccgtttcccgattgggtctgtcgtctctctccgcctagcgacagattccttctattaagggattggctcgctgagttctaagctctaaatgggtcaactcctttgttttccgcctagcgacaagggatttgctcgcacggcattggctccatcccctagtcgctggacagctctttttttgattggctcaaatcctgtaaaagggcttgacnagtcttctacatantcaccgtccgctttttcntgaanttctcccttccaattggctccaanttccntgggggcgtggccaancccttcctcttcccaaaaattggnccnggggncctttaaatttacgttntttaaattaanggggaattgggggtcgtnntttgcccnctttccnaanaantttgtttccntnaaccccnttcagggaanggccccnaaatnttccntgncctntgggancccccnttttattggtttcnttcnattccccaaaanaacnngcaaatnaaaacccnttncntgnat

SEQ ID NO: 637 - DNA, 1131 bp, Homo sapiens
  misc_feature (681)..(681): n is a, c, g, or t
  misc_feature (717)..(717): n is a, c, g, or t
  misc_feature (796)..(796): n is a, c, g, or t
  misc_feature (805)..(805): n is a, c, g, or t
  misc_feature (835)..(835): n is a, c, g, or t
  misc_feature (862)..(862): n is a, c, g, or t
  misc_feature (874)..(874): n is a, c, g, or t
  misc_feature (904)..(904): n is a, c, g, or t
  misc_feature (918)..(918): n is a, c, g, or t
  misc_feature (928)..(928): n is a, c, g, or t
  misc_feature (935)..(935): n is a, c, g, or t
  misc_feature (942)..(942): n is a, c, g, or t
  misc_feature (952)..(952): n is a, c, g, or t
  misc_feature (959)..(959): n is a, c, g, or t
  misc_feature (969)..(969): n is a, c, g, or t
  misc_feature (999)..(999): n is a, c, g, or t
  misc_feature (1003)..(1003): n is a, c, g, or t
  misc_feature (1005)..(1005): n is a, c, g, or t
  misc_feature (1013)..(1015): n is a, c, g, or t
  misc_feature (1018)..(1019): n is a, c, g, or t
  misc_feature (1031)..(1031): n is a, c, g, or t
  misc_feature (1033)..(1033): n is a, c, g, or t
  misc_feature (1038)..(1038): n is a, c, g, or t
  misc_feature (1056)..(1056): n is a, c, g, or t
  misc_feature (1059)..(1059): n is a, c, g, or t
  misc_feature (1068)..(1068): n is a, c, g, or t
  misc_feature (1071)..(1071): n is a, c, g, or t
  misc_feature (1079)..(1079): n is a, c, g, or t
  misc_feature (1093)..(1093): n is a, c, g, or t
  misc_feature (1100)..(1100): n is a, c, g, or t
  misc_feature (1104)..(1104): n is a, c, g, or t
  misc_feature (1108)..(1108): n is a, c, g, or t
  misc_feature (1114)..(1114): n is a, c, g, or t
  misc_feature (1122)..(1122): n is a, c, g, or t
  misc_feature (1128)..(1128): n is a, c, g, or t
  misc_feature (1131)..(1131): n is a, c, g, or t
ggggaaggagagaaaatggcggcggagccgaacaagaccgaaatccagactctttttaagaggcttcgcgcagttccaaccaacaaggcctgtttcgactgcggcgccaagaatccgagttgggccagcatcacgtacggtgttttcttgtgcattgactgttccggggtgcaccgctccctgggcgtccatctgagcttcatcaggtccacagagttggattccaactggaactggttccagctgaggtgtatgcaggtcggcgggaatgccaatgcgacggctttttttcgccaacatggatgcacagccaatgatgccaacaccaaatataatagccgagctgcccagatgtaccgggagaagatccggcagctggggagtgcggccctggctaggcatggcactgatctttggatagacaacatgagtagtgccgttcctaatcactccccagagaagaaggactctgatttcttcacagaacacactcaaccccctgcctgggatgcgccagccactgagccttcagggacccagcagccagccccgtctacagagagcagtggcctggcacagccggagcatggccccaacacagacctgcttggcacctcacccaaagcctcactggaactgaaaagctccatcattggcaagaagaagccagcagcagctaanaaagggctgggtgccaagaaaggcctaggggcccanaaggtgagcagccagagcttcagtgagattgagcggcaggctcaggtggcaaaaaagctccgtgagcagcaggcagccngatgccaanaagcaggcggaggagtccatggtcccctcnatgcgtctggcctaccaggagctccanattgatcgtaanaaagaggaaaaaaacctacgaatctggaanggaaaaaaccaaancaggcaaaangttgggnatgggcntggtatcccnaaacctntgttctcccnctccgggctgtctgaaaatgcaggggattnaccngnaaaccccnnntgnnggcaaaatcccncnccccnccaacctggacttttttnaanaatgttggnaantttccccntggaacccccaaanaaaaagnaaantccntttttncttaaggnaaaacnttn

SEQ ID NO: 638 - DNA, 905 bp, Homo sapiens
  misc_feature (497)..(497): n is a, c, g, or t
  misc_feature (513)..(513): n is a, c, g, or t
  misc_feature (617)..(617): n is a, c, g, or t
  misc_feature (629)..(629): n is a, c, g, or t
  misc_feature (656)..(656): n is a, c, g, or t
  misc_feature (708)..(708): n is a, c, g, or t
  misc_feature (726)..(726): n is a, c, g, or t
  misc_feature (728)..(728): n is a, c, g, or t
  misc_feature (734)..(734): n is a, c, g, or t
  misc_feature (743)..(743): n is a, c, g, or t
  misc_feature (766)..(766): n is a, c, g, or t
  misc_feature (773)..(773): n is a, c, g, or t
  misc_feature (779)..(779): n is a, c, g, or t
  misc_feature (785)..(786): n is a, c, g, or t
  misc_feature (788)..(788): n is a, c, g, or t
  misc_feature (799)..(799): n is a, c, g, or t
  misc_feature (803)..(803): n is a, c, g, or t
  misc_feature (805)..(805): n is a, c, g, or t
  misc_feature (807)..(807): n is a, c, g, or t
  misc_feature (810)..(810): n is a, c, g, or t
  misc_feature (813)..(813): n is a, c, g, or t
  misc_feature (815)..(815): n is a, c, g, or t
  misc_feature (818)..(818): n is a, c, g, or t
  misc_feature (823)..(823): n is a, c, g, or t
  misc_feature (835)..(835): n is a, c, g, or t
  misc_feature (856)..(856): n is a, c, g, or t
  misc_feature (860)..(861): n is a, c, g, or t
  misc_feature (871)..(871): n is a, c, g, or t
  misc_feature (875)..(875): n is a, c, g, or t
  misc_feature (879)..(879): n is a, c, g, or t
  misc_feature (894)..(895): n is a, c, g, or t
  misc_feature (901)..(901): n is a, c, g, or t
ggggacggagcggtcgccggcccccaccggagagacggggcgaccggccgcagggggggcggccgggggaccggtcgggccgggaccaagggcaccatgtcgtccggggccaaggagggaggtgggggctctcccgcctaccacctcccccacccccacccccacccaccccagcacgcccaatatgtgggcccctatcggctggagaagacgctgggcaaaggacagacagggctggttaaactcggggtccactgcatcacgggtcagaaggtcgccatcaagatcgtgaaccgggagaagctgtcggagtcggtgctgatgaaggtggagcgggagatcgccatcctgaagctcatcgaacacccacatgtcctcaagctccacgacgtctacgagaacaagaaatatttgtacctggttctggagcacgtctcggggggtgagctattcgactacctggtaaagaaggggagactgacgcccaaggaggcccnaaagttcttccgccanattgtgtctgcgctggacttctgccacagctactccatctgccacagagacctaaagcccgaaaacctgcttttggatgagaaaaacaacatccgcattgcaanacttcggcatgncgtccctgcaggtgggggacagcctcntggagaccagctgcgggtccccccattatgcgtgtccagaagtgattaaggnggaaaaaatatgatggcncncccggncaaaacttntggaagcttgtggaatcatcctnttcgccntgctcntggggnntntgccctttttntgancnanaanctncnccnacttnctggaaaaaagntgaaacggggcggtctttccnattnnccccattttntttnttcncaattgccaaaaccnncttaanggga

SEQ ID NO: 639 - DNA, 873 bp, Homo sapiens
  misc_feature (443)..(443): n is a, c, g, or t
  misc_feature (506)..(506): n is a, c, g, or t
  misc_feature (513)..(513): n is a, c, g, or t
  misc_feature (535)..(536): n is a, c, g, or t
  misc_feature (547)..(547): n is a, c, g, or t
  misc_feature (564)..(564): n is a, c, g, or t
  misc_feature (582)..(582): n is a, c, g, or t
  misc_feature (591)..(591): n is a, c, g, or t
  misc_feature (606)..(606): n is a, c, g, or t
  misc_feature (624)..(624): n is a, c, g, or t
  misc_feature (663)..(663): n is a, c, g, or t
  misc_feature (674)..(674): n is a, c, g, or t
  misc_feature (699)..(699): n is a, c, g, or t
  misc_feature (701)..(701): n is a, c, g, or t
  misc_feature (707)..(707): n is a, c, g, or t
  misc_feature (718)..(718): n is a, c, g, or t
  misc_feature (725)..(725): n is a, c, g, or t
  misc_feature (730)..(730): n is a, c, g, or t
  misc_feature (738)..(738): n is a, c, g, or t
  misc_feature (741)..(741): n is a, c, g, or t
  misc_feature (743)..(743): n is a, c, g, or t
  misc_feature (757)..(757): n is a, c, g, or t
  misc_feature (764)..(764): n is a, c, g, or t
  misc_feature (775)..(776): n is a, c, g, or t
  misc_feature (779)..(779): n is a, c, g, or t
  misc_feature (782)..(782): n is a, c, g, or t
  misc_feature (790)..(791): n is a, c, g, or t
  misc_feature (793)..(794): n is a, c, g, or t
  misc_feature (802)..(804): n is a, c, g, or t
  misc_feature (809)..(809): n is a, c, g, or t
  misc_feature (811)..(811): n is a, c, g, or t
  misc_feature (819)..(819): n is a, c, g, or t
  misc_feature (833)..(833): n is a, c, g, or t
  misc_feature (841)..(841): n is a, c, g, or t
  misc_feature (845)..(845): n is a, c, g, or t
  misc_feature (850)..(850): n is a, c, g, or t
  misc_feature (864)..(864): n is a, c, g, or t
  misc_feature (866)..(866): n is a, c, g, or t
gatgtgctcccctgcacctctggggtgcagaaacctcttgcctccagatttgggtggagcctctgtgggaaccataggaagtgtgtgggctgccttcctgggcaagtatttcccagtgggaagttggagggggctttaacaaagttttactccctcccctgttcccctgatctagtgctcaggacccttcaccatcaggaattccttcctgtcatctaacctcagtcctgcctactgcagttccagccaacctgctctttcctgagttcaaagcaggtggagactggctggttaccatctttgcactggcccttcggagattcggggactcagttctggtggggtcaccctccctgtcctcccgcctgtgggagggagggagggctggctcaggcatcgtctcccgcaatgggcagagagagcatagacaggtggaccaacanacagctggcccctggaggcagaaaggcccttctaacttccagattgtatgcttgagtgatggntccccancccaagcccacttttccctcanntcacccttcancctgttccttcttgccntgaccccagcccgtgcanctgctctantccaggaatggatgnggggaactcttcctgggnttctgggctcctgcataacttcaccctcacctcaatcangaagcctcaantggcctaaaatctgggggcaaagcnancacacnggctgcaaaangggacancccanccccttcntantnttggaaagggcccntgcaaancctctgatccnntgnccnaaccctcnntnntccttccnnnaagtntncaaaaganaaaacccaaagaanatcccacngaanaaaanaaaaaaaaaggctntnattgagc

SEQ ID NO: 640 - DNA, 860 bp, Homo sapiens
  misc_feature (829)..(829): n is a, c, g, or t
  misc_feature (837)..(837): n is a, c, g, or t
  misc_feature (839)..(860): n is a, c, g, or t
gcccacgcgtccggtcagaaccgccgtcgctcgctcccttctcggcagtggtacctgttcccggtgtccctgaggacgtgcgggccaggtacggccccgaaagtaggaagcggagggggagcaggtttgcggggccaagtgttgcggcgacgcacctcacgtcgagaatcgggaggaggagactgcaaggataggcccaggagtaatggagtccaaagaggaacgagcgttaaacaatctcatcgtggaaaatgtcaaccaggaaaatgatgaaaaagatgaaaaggagcaagttgctaataaaggggagcccttggccctacctttgaatgttagtgaatactgtgtgcctagaggaaaccgtaggcggttccgcgttaggcagcccatcctgcagtatagatgggacataatgcataggcttggagagccacaggcaaggatgagagaggagaatatggaaaggattggggaggaggtgagacagctgatggaaaagctgagggaaaagcagttgagtcatagtctgcgggcagtcagcactgatccccctcaccatgaccatcacgatgagttttgccttatgccctgaatcctgatggtttccctgaagttaatagggagacccctgcttcctaaacttacacatttgtggtgtacctttgtcgtaaacgttttgatgttacctatttcttgtgggtctcctattaccagcttctaaatgaatgttgtttttgacccagtttgtaagtttctgtcagcaggagagttttacctattgcatggaaagatgctcattatatattgtgaagttaataaaacagttttnaaaagccnannnnnnnnnnnnnnnnnnnnnn

SEQ ID NO: 641 - DNA, 1065 bp, Homo sapiens
  misc_feature (763)..(763): n is a, c, g, or t
  misc_feature (829)..(829): n is a, c, g, or t
  misc_feature (858)..(858): n is a, c, g, or t
  misc_feature (860)..(860): n is a, c, g, or t
  misc_feature (869)..(869): n is a, c, g, or t
  misc_feature (872)..(872): n is a, c, g, or t
  misc_feature (890)..(890): n is a, c, g, or t
  misc_feature (922)..(922): n is a, c, g, or t
  misc_feature (926)..(926): n is a, c, g, or t
  misc_feature (936)..(936): n is a, c, g, or t
  misc_feature (938)..(938): n is a, c, g, or t
  misc_feature (950)..(951): n is a, c, g, or t
  misc_feature (955)..(955): n is a, c, g, or t
  misc_feature (965)..(965): n is a, c, g, or t
  misc_feature (982)..(982): n is a, c, g, or t
  misc_feature (994)..(994): n is a, c, g, or t
  misc_feature (997)..(997): n is a, c, g, or t
  misc_feature (1000)..(1000): n is a, c, g, or t
  misc_feature (1004)..(1004): n is a, c, g, or t
  misc_feature (1010)..(1010): n is a, c, g, or t
  misc_feature (1012)..(1012): n is a, c, g, or t
  misc_feature (1016)..(1016): n is a, c, g, or t
  misc_feature (1022)..(1023): n is a, c, g, or t
  misc_feature (1030)..(1030): n is a, c, g, or t
  misc_feature (1049)..(1049): n is a, c, g, or t
  misc_feature (1051)..(1051): n is a, c, g, or t
  misc_feature (1054)..(1054): n is a, c, g, or t
  misc_feature (1062)..(1063): n is a, c, g, or t
  misc_feature (1065)..(1065): n is a, c, g, or t
ggagaaatgctggggtgcagcttcaagcttaggaccacccaccatgcctatccaggtgctgaagggcctgaccatcactcattaagaacagaggaggctgcctgttactcctggtgttgcatccctccagacactctgctgtttcctgcctaggcgtggctgcagccatggctaggaaagcgctgccacccacccacctgggccagagctggttctgctcctgctgcagggacactgagctggctatctcggcgcttcgggcaagaactgcaacaggctctcctgggtcctgcaggtgtacagccgggcccctgccttgtgcctcagctctcgagagctgctgctgccgggtgacctgatccaacctgataaggtgccatcttcagctaccactgcaaggccctgagggcaacagcagcacggcactgcccacccggctgctgatggcctggtgccagctgggagtcctcccggcacttcgaggccactgagccacccttccagccccagcccaccatggacaggggtatccagcttcctcctcaacctcgtcctctgcccctgagccagtgacgcccaaggacatgcctgttacccaggtcctgtaccagcactagctggtcaagggcatgacagtgctggaggccgtcttggagatccaggccatcactggcagcaggctgctctccatggtgccagggcccgccaggccaccaggctcatgctgggacccaacccagtgcacaaggacttggctgctganccacacacccagaaaaaggtggataagtgggctaccaagggcttcctgcaggctaaggggaagganccacccccgcttccctattgtgaacaggncntatgggganganctgtccataccccaccgngaaaacctgggcctggctctcaaagaaaaaanaccnccttggcctngntgctccaggggnnaaanaagccaaaantcctgggggaactgccncctggttttganctncanttcnggaaantngggnaaatgnnaaggggnaggcaaaaaacccttgggnanaancccccctnngn

SEQ ID NO: 642 - DNA, 744 bp, Homo sapiens
gcgcagcagtcagggtcactgtgggagccctggggtggagtgacaaaccgcattgtcctgtgcccgccatggcagaagcgcagcctttgtatggaggcccaaccgcgctcccgtctggagaagcggcttccggggtgtggctgccgggtcggctctggtccacagcacggtgccggggctgcaggttgttgagggctgtgactccgtggggctcagccaggctccagcagggtcagacgtgctgttaagagcaaagccacagacgatgacttgtccattctcagtggatgctccaggctgtgcctacacagcagtgctggtgacatgtccagggttccagggcccggtggcctgggagctgctttctccccactggctgggctgcatctggccctggctggaggccttgctttgaggggctgtgaccctcttcccccaggccctccccagccgacgacagccaccggagaggagatcggaacacgattgtctcagatgcagggcgctgtgcgggacgaagccgcaaggactctcgtatcgggcccttgggactcgggaggtgccagaggcggcggctgctctggacctcggtgttcactgacctttgttttacttgcctctgctcgactccgagagcaggaaacccggccgtggcctggcagctccgcctcccatgcccgcacgctggggtctgtcttgtctggagcagtggggcacaccccggaggaggcgggggtcagggct

SEQ ID NO: 643 - DNA, 1240 bp, Homo sapiens
  misc_feature (757)..(757): n is a, c, g, or t
  misc_feature (786)..(786): n is a, c, g, or t
  misc_feature (791)..(791): n is a, c, g, or t
  misc_feature (793)..(793): n is a, c, g, or t
  misc_feature (875)..(875): n is a, c, g, or t
  misc_feature (880)..(880): n is a, c, g, or t
  misc_feature (883)..(883): n is a, c, g, or t
  misc_feature (897)..(897): n is a, c, g, or t
  misc_feature (899)..(899): n is a, c, g, or t
  misc_feature (920)..(921): n is a, c, g, or t
  misc_feature (937)..(937): n is a, c, g, or t
  misc_feature (947)..(947): n is a, c, g, or t
  misc_feature (950)..(950): n is a, c, g, or t
  misc_feature (953)..(953): n is a, c, g, or t
  misc_feature (957)..(957): n is a, c, g, or t
  misc_feature (994)..(994): n is a, c, g, or t
  misc_feature (1004)..(1004): n is a, c, g, or t
  misc_feature (1014)..(1015): n is a, c, g, or t
  misc_feature (1021)..(1021): n is a, c, g, or t
  misc_feature (1026)..(1026): n is a, c, g, or t
  misc_feature (1034)..(1034): n is a, c, g, or t
  misc_feature (1039)..(1040): n is a, c, g, or t
  misc_feature (1064)..(1064): n is a, c, g, or t
  misc_feature (1066)..(1066): n is a, c, g, or t
  misc_feature (1076)..(1076): n is a, c, g, or t
  misc_feature (1078)..(1078): n is a, c, g, or t
  misc_feature (1083)..(1083): n is a, c, g, or t
  misc_feature (1088)..(1088): n is a, c, g, or t
  misc_feature (1099)..(1099): n is a, c, g, or t
  misc_feature (1109)..(1109): n is a, c, g, or t
  misc_feature (1126)..(1127): n is a, c, g, or t
  misc_feature (1134)..(1134): n is a, c, g, or t
  misc_feature (1147)..(1147): n is a, c, g, or t
  misc_feature (1151)..(1151): n is a, c, g, or t
  misc_feature (1160)..(1160): n is a, c, g, or t
  misc_feature (1163)..(1163): n is a, c, g, or t
  misc_feature (1168)..(1168): n is a, c, g, or t
  misc_feature (1172)..(1173): n is a, c, g, or t
  misc_feature (1183)..(1183): n is a, c, g, or t
  misc_feature (1191)..(1191): n is a, c, g, or t
  misc_feature (1197)..(1197): n is a, c, g, or t
  misc_feature (1204)..(1204): n is a, c, g, or t
  misc_feature (1211)..(1211): n is a, c, g, or t
  misc_feature (1220)..(1221): n is a, c, g, or t
  misc_feature (1225)..(1227): n is a, c, g, or t
  misc_feature (1238)..(1238): n is a, c, g, or t
ggccaggcctggctcgagatgccgaagtcgtgcgcggcccggcagtgctgcaaccgctacagcagccgcaggaagcagctcaccttccaccggtttccgttcagccgcccggagctgctgaaggaatgggtgctgaacatcggccggggcaacttcaagcccaagcagcacacggtcatctgctccgagcacttccggccagagtgcttcagcgcctttggaaaccgcaagaacctaaagcacaatgccgtgcccacggtgttcgcctttcaggaccccacacaggtgagggagaacacagaccctgccagtgagagaggaaatgccagctcttctcagaaagaaaaggtcctccctgaggcgggggccggagaggacagtcctgggagaaacatggacactgcacttgaagagcttcagttgcccccaaatgccgaaggccacgtaaaacaggtctcgccacggaggccgcaagcaacagaggctgttggccggccgactggccctgcaggcctgagaaggacccccaacaagcagccatctgatcacagctatgcccttttggacttagattccctgaagaaaaaactcttcctcactctgaaggaaaatgaaaagctccggaagcgcttgcaggcccagaggctggtgatgcgaaggatgtccagccgcctccgtgcttgcaaagggcaccagggactccaggccagacttgggccagagcagcagagctgagccccacaggctccggacgcanaggtggcagtggcaccagggccggcaganctttngnagctctggctgtggacatttttgtctgctgtggacactgaaaaagttggccatgaaggcctgcttggccggggatcgaaaanagtanccnaactccccggcganancctcaatgccgtctggggganngtttaaaaggcgtggncactaaggantgncanattntgtgaaccatgaaaaagctttttcctcccatgggtancaaaaatccnagcttgaagnntaattntgganccttttcnttttnnccaaccccaaaaaaaaaaattttngnaaacccccantnggggnaaatnctcccccaggnaaaaaacccntttaagggggcttggcnnttttggngggggaaagggtncccntccttcatnaancttgnaaanncctttggggnttttaagnaagaanccttttnccccccngggtgtgannggcnnnttaaaaaattntt

SEQ ID NO: 644 - DNA, 555 bp, Homo sapiens
  misc_feature (333)..(333): n is a, c, g, or t
  misc_feature (351)..(351): n is a, c, g, or t
  misc_feature (361)..(361): n is a, c, g, or t
  misc_feature (363)..(363): n is a, c, g, or t
  misc_feature (371)..(371): n is a, c, g, or t
  misc_feature (389)..(389): n is a, c, g, or t
  misc_feature (398)..(398): n is a, c, g, or t
  misc_feature (401)..(401): n is a, c, g, or t
  misc_feature (435)..(435): n is a, c, g, or t
  misc_feature (441)..(441): n is a, c, g, or t
  misc_feature (446)..(446): n is a, c, g, or t
  misc_feature (458)..(458): n is a, c, g, or t
  misc_feature (467)..(467): n is a, c, g, or t
  misc_feature (478)..(478): n is a, c, g, or t
  misc_feature (487)..(487): n is a, c, g, or t
  misc_feature (492)..(492): n is a, c, g, or t
  misc_feature (495)..(495): n is a, c, g, or t
  misc_feature (497)..(497): n is a, c, g, or t
  misc_feature (499)..(499): n is a, c, g, or t
  misc_feature (513)..(513): n is a, c, g, or t
  misc_feature (520)..(521): n is a, c, g, or t
  misc_feature (524)..(524): n is a, c, g, or t
  misc_feature (527)..(527): n is a, c, g, or t
  misc_feature (531)..(532): n is a, c, g, or t
  misc_feature (534)..(536): n is a, c, g, or t
  misc_feature (538)..(538): n is a, c, g, or t
  misc_feature (546)..(546): n is a, c, g, or t
  misc_feature (550)..(550): n is a, c, g, or t
gccagcactgagttctgcccgggagaagccgacccctcccgcaatgcccgccccgccgtgcgcctcctgccatgctgcacgcgccgccctccgccgtccgctctcgggccaagcgctgtgcggtgcctgcttctgcgccgccttcgaggccgaggtgctgcacacggtgctcgccggccgcctgctgccgcccggcgcggtggtggccgtgggcgcctcgggcggcaaggactccacggtgctggcgcacgtgctgcgcgcgctggcgccgcgcctgggcatctcactgcagctcgtggccgtcgatgagggcatcggtggctaccgggacgnggcgttggcggccgtgcngcgccaggcngngcgctggnagctgccgctcacggtcntggcctacnaanacctctttgggggctggactatggacgccgtggnccgcancacanccgagctccggncgcagccgntcctgctgcancttctgtgnagtgntgngncnccgggcgctgtaanaaggagnncancangtgnnannnanacatatcntganaagtc

SEQ ID NO: 645 - DNA, 1056 bp, Homo sapiens
  misc_feature (713)..(713): n is a, c, g, or t
  misc_feature (734)..(734): n is a, c, g, or t
  misc_feature (781)..(781): n is a, c, g, or t
  misc_feature (790)..(791): n is a, c, g, or t
  misc_feature (804)..(804): n is a, c, g, or t
  misc_feature (829)..(829): n is a, c, g, or t
  misc_feature (836)..(836): n is a, c, g, or t
  misc_feature (840)..(840): n is a, c, g, or t
  misc_feature (877)..(877): n is a, c, g, or t
  misc_feature (888)..(888): n is a, c, g, or t
  misc_feature (891)..(891): n is a, c, g, or t
  misc_feature (903)..(903): n is a, c, g, or t
  misc_feature (910)..(910): n is a, c, g, or t
  misc_feature (917)..(917): n is a, c, g, or t
  misc_feature (929)..(929): n is a, c, g, or t
  misc_feature (931)..(931): n is a, c, g, or t
  misc_feature (937)..(937): n is a, c, g, or t
  misc_feature (939)..(939): n is a, c, g, or t
  misc_feature (944)..(944): n is a, c, g, or t
  misc_feature (958)..(958): n is a, c, g, or t
  misc_feature (969)..(970): n is a, c, g, or t
  misc_feature (974)..(974): n is a, c, g, or t
  misc_feature (983)..(983): n is a, c, g, or t
  misc_feature (994)..(994): n is a, c, g, or t
  misc_feature (1001)..(1001): n is a, c, g, or t
  misc_feature (1010)..(1012): n is a, c, g, or t
  misc_feature (1014)..(1015): n is a, c, g, or t
  misc_feature (1019)..(1019): n is a, c, g, or t
  misc_feature (1026)..(1026): n is a, c, g, or t
  misc_feature (1029)..(1030): n is a, c, g, or t
  misc_feature (1032)..(1032): n is a, c, g, or t
  misc_feature (1045)..(1045): n is a, c, g, or t
ggaaggatgcacccggcaggcttggcggcggcggctgcggggacgccccggctgccctcgaagcggaggatccctgtgtcccagccgggcatggccgacccccaccagcttttcgatgacacaagttcagcccagagccggggctatggggcccagcgggcacctggtggcctaagttatcctgcagcctctcccacgccccatgcagccttcctggctgacccggtgtccaacatggccatggcctatgggagcagcctggccgcgcagggcaaggagctggtggataagaacatcgaccgcttcatccccatcaccaagctcaagtattactttgctgtggacaccatgtatgtgggcagaaagctgggcctgctgttcttcccctacctacaccaggactgggaagtgcagtaccaacaggacaccccggtggccccccgctttgacgtcaatgccccggacctctacattccagcaatggctttcatcacctacgttttggtggctggtcttgcgctggggacccaggataggttctccccagacctcctggggctgcaagcgagctcagccctggcctggctgaccctggaggtgctggccatcctgctcagcctctatctggtcactgtcaacaaccgacctcaccaccatcgacctggtggcccttcttgggctacaaaatatgtcgggatgattggcggggttcntcatggggcctgctcttcggnaagattggctactacctggtgctgggcttggtgctgcgtggccatcntttgtgttnnatgaatccggaangctgcggctgaaaatctttgggcanaaaccancaanctgaaggggttccggtgcgtggggcccggaaacaagnttgcccatgtnacnttaaccattggngggtggnggggggnccaacccaatgntnaatggnantgggnttaaccttccaccntgggggggggnnaaanccccccccnctttaaaaccnccccccnttttgcttnnntnnttgntgggggnccnnantttggggcccccnaaaaatttttt

SEQ ID NO: 646 - DNA, 1088 bp, Homo sapiens
  misc_feature (757)..(757): n is a, c, g, or t
  misc_feature (812)..(812): n is a, c, g, or t
  misc_feature (816)..(816): n is a, c, g, or t
  misc_feature (830)..(830): n is a, c, g, or t
  misc_feature (840)..(840): n is a, c, g, or t
  misc_feature (854)..(854): n is a, c, g, or t
  misc_feature (865)..(865): n is a, c, g, or t
  misc_feature (889)..(889): n is a, c, g, or t
  misc_feature (891)..(891): n is a, c, g, or t
  misc_feature (899)..(899): n is a, c, g, or t
  misc_feature (914)..(914): n is a, c, g, or t
  misc_feature (922)..(922): n is a, c, g, or t
  misc_feature (929)..(929): n is a, c, g, or t
  misc_feature (932)..(932): n is a, c, g, or t
  misc_feature (945)..(945): n is a, c, g, or t
  misc_feature (950)..(951): n is a, c, g, or t
  misc_feature (963)..(963): n is a, c, g, or t
  misc_feature (969)..(969): n is a, c, g, or t
  misc_feature (972)..(972): n is a, c, g, or t
  misc_feature (975)..(975): n is a, c, g, or t
  misc_feature (979)..(979): n is a, c, g, or t
  misc_feature (989)..(989): n is a, c, g, or t
  misc_feature (997)..(997): n is a, c, g, or t
  misc_feature (1004)..(1004): n is a, c, g, or t
  misc_feature (1007)..(1007): n is a, c, g, or t
  misc_feature (1009)..(1009): n is a, c, g, or t
  misc_feature (1016)..(1016): n is a, c, g, or t
  misc_feature (1022)..(1022): n is a, c, g, or t
  misc_feature (1024)..(1024): n is a, c, g, or t
  misc_feature (1030)..(1030): n is a, c, g, or t
  misc_feature (1036)..(1037): n is a, c, g, or t
  misc_feature (1040)..(1040): n is a, c, g, or t
  misc_feature (1051)..(1051): n is a, c, g, or t
  misc_feature (1055)..(1055): n is a, c, g, or t
  misc_feature (1066)..(1066): n is a, c, g, or t
  misc_feature (1070)..(1070): n is a, c, g, or t
  misc_feature (1072)..(1072): n is a, c, g, or t
  misc_feature (1075)..(1076): n is a, c, g, or t
  misc_feature (1080)..(1080): n is a, c, g, or t
  misc_feature (1087)..(1087): n is a, c, g, or t
gcccacgcgtccgcccacgcgtccgaggtcatcaaagacctaccttggcctccacctgtgggacagctggacagcagcccctccctgcctgatggggacagggacatctccggtccagcctcgcccctccctgagcccagcctggaggacagcagcgcccagtttgaaggaccggagaagagctgcctgtcacctggccgggaggagaaggggcggctacctccccgactctctgcagggaaccccaagtcagccaaacccctaagcatggagcccagcagccccctgggggagtggacagatccagcactgcctctggaaaaccaggtctggtatcacggggccatcagccgaaccgacgccgagaacctgctccggctgtgcaaagaggccagctacctggtgcgcaacagtgagaccagcaagaatgacttctccctctccctcaagagcagccagggattcatgcacatgaagctgtcccgaaccaaggaacacaaatatgtgctgggccagaacagcccgcccttcagcagcgtccctgaaattgtgcaccactatgccagccgcaagctacccattaagggagccgaacacatgtccctgctctaccctgtggccatccggactctttagatgtgaagccagggcactgtgatagacctgtacccagccctgtgcccatcacctggctgagggctgtggctcttgccagggacgtgatctttcaaacctttcttctcctgggatccagtanaagctggagattccttaatttattctaaagggaaagggctcctggggccttggantaanggggttgtctgganctggggaaanaggaatccctgganaaaaaggatancccttggaggaaagggggttccananctactggnatggtagggagtttnaaattggnagcttcnggntcttttccaactnagggnnaaaggggggaanttcaanaanaanaacnttttccccantgggtccntgcaagnaangnaaaattnggcccntngggggncttaannctntttgcttcgtncccnaatttcacccnaaangntgnnaggnttccccna

SEQ ID NO: 647 - DNA, 1090 bp, Homo sapiens
  misc_feature (718)..(718): n is a, c, g, or t
  misc_feature (816)..(816): n is a, c, g, or t
  misc_feature (826)..(826): n is a, c, g, or t
  misc_feature (836)..(836): n is a, c, g, or t
  misc_feature (844)..(844): n is a, c, g, or t
  misc_feature (862)..(862): n is a, c, g, or t
  misc_feature (864)..(864): n is a, c, g, or t
  misc_feature (870)..(870): n is a, c, g, or t
  misc_feature (904)..(904): n is a, c, g, or t
  misc_feature (914)..(914): n is a, c, g, or t
  misc_feature (916)..(916): n is a, c, g, or t
  misc_feature (920)..(920): n is a, c, g, or t
  misc_feature (926)..(926): n is a, c, g, or t
  misc_feature (949)..(949): n is a, c, g, or t
  misc_feature (960)..(960): n is a, c, g, or t
  misc_feature (963)..(963): n is a, c, g, or t
  misc_feature (969)..(969): n is a, c, g, or t
  misc_feature (975)..(975): n is a, c, g, or t
  misc_feature (977)..(977): n is a, c, g, or t
  misc_feature (985)..(985): n is a, c, g, or t
  misc_feature (988)..(989): n is a, c, g, or t
  misc_feature (1003)..(1004): n is a, c, g, or t
  misc_feature (1014)..(1014): n is a, c, g, or t
  misc_feature (1022)..(1022): n is a, c, g, or t
  misc_feature (1030)..(1030): n is a, c, g, or t
  misc_feature (1055)..(1056): n is a, c, g, or t
  misc_feature (1065)..(1065): n is a, c, g, or t
  misc_feature (1075)..(1076): n is a, c, g, or t
gacatgggagagaagccttatcaatgcaaagaatgtggaaaagcatttgcatataccagttctcttcgtagacatgaaaggacccactctgggaaaaaaccgtatgaatgtaagcaatatggggaaggcttatcctatcttataagttttcaaacacacataagaatgaactctggagaaagaccttataaatgtaagatatgtgggaaaggcttttattctgccaagtcatttcaaacacatgaaaaaactcacactggagagaaacgctataaatgcaagcaatgtggtaaagccttcaatctttccagttcctttcgatatcatgaaaggattcacactggagagaaaccctatgagtgtaagcagtgtgggaaagccttcagatctgcctcacagcttcgagtgcacggtgggactcacactggagagaaaccctatgaatgtaaggaatgtgggaaagccttcagatctacctcacaccttcgagtgcatggtaggactcatactggagagaaaccctatgaatgtaaggaatgtgggaaagccttcagatatgtgaagcaccttcaaattcatgaaaggacagaaaaacacataagaatgccctctggagaaagaccttataaatgtagtatatgtgagaaaggcttttattctgccaagtcatttcaaacacatgaaaaaactcacactggagagaaaccctatgaatgcnaccaatgtggtaaagccttcagatgttgcaattcccttcgatatcatgaaagggactcacactggaagagaaaccctatgagtgtaagcaatgtgggnaagccttcanatctgcctcncaccttcnaatgcatgaaaggactcncnctgganagaaacccctatgagtgtaagccatgggggaaancccttcagtngngccncaaccntccaaagcatggtaggacccccnctggaaaaaanccntatgantgtaancnatgggggnaannccttcaaatctgcnncaacccttcnaagcctgnaaaggacncccctgggaaaaaaccctttgattnnagggatggnaaaaaccttnnggaaattccctttt

SEQ ID NO: 648 - DNA, 1089 bp, Homo sapiens
  misc_feature (831)..(831): n is a, c, g, or t
  misc_feature (856)..(856): n is a, c, g, or t
  misc_feature (859)..(859): n is a, c, g, or t
  misc_feature (861)..(861): n is a, c, g, or t
  misc_feature (876)..(876): n is a, c, g, or t
  misc_feature (898)..(898): n is a, c, g, or t
  misc_feature (935)..(935): n is a, c, g, or t
  misc_feature (938)..(938): n is a, c, g, or t
  misc_feature (947)..(947): n is a, c, g, or t
  misc_feature (960)..(960): n is a, c, g, or t
  misc_feature (973)..(973): n is a, c, g, or t
  misc_feature (979)..(979): n is a, c, g, or t
  misc_feature (991)..(991): n is a, c, g, or t
  misc_feature (998)..(998): n is a, c, g, or t
  misc_feature (1004)..(1004): n is a, c, g, or t
  misc_feature (1015)..(1015): n is a, c, g, or t
  misc_feature (1017)..(1019): n is a, c, g, or t
  misc_feature (1027)..(1027): n is a, c, g, or t
  misc_feature (1032)..(1032): n is a, c, g, or t
  misc_feature (1039)..(1039): n is a, c, g, or t
  misc_feature (1042)..(1042): n is a, c, g, or t
  misc_feature (1051)..(1051): n is a, c, g, or t
  misc_feature (1055)..(1055): n is a, c, g, or t
  misc_feature (1057)..(1057): n is a, c, g, or t
  misc_feature (1066)..(1066): n is a, c, g, or t
gcccagctccttcagcagagcagcagccagaaggatgagatccttcagacggtcaaggaggagcagtcccggctggagcagggcctgagtgagcaccagcgccacctcgacgcagagcggcagcggctgcaggagcagctgaagcagacggaacagaacatttccagccggatccagaagctgctgcaggacaatcagagacaaaagaaaagctccgagattttgaaatcgctggaaaatgaaagaataagaatggaacagttgatgtccataacccaggaggagactgagagcctgcggcgacgtgacgttgcctccgccatgcagcagatgctgactgagagctgtaagaaccggctcatccagatggcctacgaatctcagaggcagaacttggtccagcaggcctgttccagcatggccgaaatggatgaacgattccagcagattctgtcgtggcagcaaatggatcagaacaaagccatcagccagatcctgcaggagagcgcgatgcagaaggctgcgttcgaggcactccaggtgaagaaagacctgatgcatcggcagatcaggagccagattaagttaatagaaactgagttattgcagctgacacagctggagttaaagaggaagtccctggacacagagtcactccaggagatgatctcggagcagcgctgggccctcagctccctgctccagcagctgctcaaagagaagcagcagcgagaggaagagctccgggaaatcctgacggagttagaagccaaaagtgaaaccaggcaggaaaattactggctgattcagtatcaacggcttttgaaccanaagcccttgtccttgaagctgcaanaanangggatggagcgccanctggtggcccctcctggagganctgtcggctgaacactacctgcccatctttgcgcacnccngcctctcantggaactgctganccaaatgagcccnggggancttggccaaggngggcgtntcaaanctggcctgcancnnnaatcctcngaaantccaganctnttggatgcncccngnatccccccnaactgaaacccccatgggggagg

SEQ ID NO: 649 - DNA, 1058 bp, Homo sapiens
  misc_feature (805)..(805): n is a, c, g, or t
  misc_feature (817)..(817): n is a, c, g, or t
  misc_feature (837)..(837): n is a, c, g, or t
  misc_feature (841)..(841): n is a, c, g, or t
  misc_feature (843)..(843): n is a, c, g, or t
  misc_feature (852)..(852): n is a, c, g, or t
  misc_feature (869)..(869): n is a, c, g, or t
  misc_feature (895)..(895): n is a, c, g, or t
  misc_feature (900)..(900): n is a, c, g, or t
  misc_feature (902)..(902): n is a, c, g, or t
  misc_feature (918)..(918): n is a, c, g, or t
  misc_feature (928)..(928): n is a, c, g, or t
  misc_feature (931)..(932): n is a, c, g, or t
  misc_feature (940)..(940): n is a, c, g, or t
  misc_feature (951)..(951): n is a, c, g, or t
  misc_feature (961)..(961): n is a, c, g, or t
  misc_feature (964)..(965): n is a, c, g, or t
  misc_feature (969)..(969): n is a, c, g, or t
  misc_feature (974)..(974): n is a, c, g, or t
  misc_feature (989)..(989): n is a, c, g, or t
  misc_feature (996)..(996): n is a, c, g, or t
  misc_feature (1014)..(1014): n is a, c, g, or t
  misc_feature (1017)..(1017): n is a, c, g, or t
  misc_feature (1025)..(1025): n is a, c, g, or t
  misc_feature (1030)..(1030): n is a, c, g, or t
  misc_feature (1035)..(1035): n is a, c, g, or t
  misc_feature (1039)..(1039): n is a, c, g, or t
  misc_feature (1041)..(1041): n is a, c, g, or t
  misc_feature (1043)..(1043): n is a, c, g, or t
  misc_feature (1048)..(1048): n is a, c, g, or t
  misc_feature (1051)..(1051): n is a, c, g, or t
  misc_feature (1056)..(1056): n is a, c, g, or t
  misc_feature (1058)..(1058): n is a, c, g, or t
gtccacatggagtacagctgcggcacagcggccatccggggcaccaaggagctgggggagggccagcacttctgggagatcaagatgacctctcccgtctacggcaccgacatgatggtgggcatcgggacgtcggatgtggacctggacaaataccgccacacgttctgcagcctgctgggcagggatgaggacagctggggcctctcctacacgggcctcctccaccacaagggcgacaagaccagcttctcgtcgcggttcggccagggctccatcattggcgtgcacctggacacctggcacggcacactcacctttttcaagaacaggaagtgtataggtgtggcagccaccaagctgcagaacaagagattctacccgatggtgtgctccacggcggcccggagcagcatgaaggtcacccgctcctgtgccagcgccacttccctccagtacctgtgctgccaccgcctgcgccagctgcggccagactcgggagacacgctggagggtctgccgctgccgccgggcctcaagcaggtgctacacaacaagctgggctgggtcctgagcatgagttgcagccgccgcaaggctccagtgtccgatccccaggcagcgacctccgcccaccccagcagtcgcgagcctcggccctgccagaggaagcgctgccgccggacctgactgacttcccagtggaactgccttcttgggctgggacagcccctttcctctgtcccttctttctctgtccccttcctttccagccacactccagggcggaattggatgaagcccnttccggaagganccatctcttgctcccaaggntggnanagtcctttntgtgggggctctaaggnccctctgctgctgtgctggggtgggnaaacngnctgccctgaaccccangtcttggggnagnntccaaganaaaaacctggntgaacccccnttnntttnccaanggccccggtttttcnaaattgntctgcatgctgtcacggntgncccccctnaaaantttanggangnanaatgnaanttatntn

SEQ ID NO: 650 - DNA, 1286 bp, Homo sapiens
  misc_feature (806)..(806): n is a, c, g, or t
  misc_feature (851)..(851): n is a, c, g, or t
  misc_feature (853)..(853): n is a, c, g, or t
  misc_feature (859)..(859): n is a, c, g, or t
  misc_feature (873)..(873): n is a, c, g, or t
  misc_feature (880)..(880): n is a, c, g, or t
  misc_feature (882)..(882): n is a, c, g, or t
  misc_feature (915)..(915): n is a, c, g, or t
  misc_feature (920)..(920): n is a, c, g, or t
  misc_feature (926)..(926): n is a, c, g, or t
  misc_feature (932)..(932): n is a, c, g, or t
  misc_feature (934)..(934): n is a, c, g, or t
  misc_feature (946)..(946): n is a, c, g, or t
  misc_feature (959)..(959): n is a, c, g, or t
  misc_feature (961)..(961): n is a, c, g, or t
  misc_feature (964)..(964): n is a, c, g, or t
  misc_feature (970)..(971): n is a, c, g, or t
  misc_feature (981)..(981): n is a, c, g, or t
  misc_feature (986)..(986): n is a, c, g, or t
  misc_feature (992)..(992): n is a, c, g, or t
  misc_feature (995)..(995): n is a, c, g, or t
  misc_feature (1004)..(1004): n is a, c, g, or t
  misc_feature (1028)..(1028): n is a, c, g, or t
  misc_feature (1034)..(1034): n is a, c, g, or t
  misc_feature (1052)..(1052): n is a, c, g, or t
  misc_feature (1054)..(1054): n is a, c, g, or t
  misc_feature (1060)..(1060): n is a, c, g, or t
  misc_feature (1066)..(1066): n is a, c, g, or t
  misc_feature (1069)..(1069): n is a, c, g, or t
  misc_feature (1076)..(1076): n is a, c, g, or t
  misc_feature (1084)..(1084): n is a, c, g, or t
  misc_feature (1124)..(1124): n is a, c, g, or t
  misc_feature (1126)..(1127): n is a, c, g, or t
  misc_feature (1133)..(1133): n is a, c, g, or t
  misc_feature (1140)..(1140): n is a, c, g, or t
  misc_feature (1154)..(1154): n is a, c, g, or t
  misc_feature (1164)..(1164): n is a, c, g, or t
  misc_feature (1167)..(1167): n is a, c, g, or t
  misc_feature (1169)..(1170): n is a, c, g, or t
  misc_feature (1173)..(1173): n is a, c, g, or t
  misc_feature (1190)..(1191): n is a, c, g, or t
  misc_feature (1195)..(1195): n is a, c, g, or t
  misc_feature (1209)..(1209): n is a, c, g, or t
  misc_feature (1212)..(1212): n is a, c, g, or t
  misc_feature (1219)..(1219): n is a, c, g, or t
  misc_feature (1224)..(1224): n is a, c, g, or t
  misc_feature (1229)..(1229): n is a, c, g, or t
  misc_feature (1254)..(1254): n is a, c, g, or t
  misc_feature (1259)..(1259): n is a, c, g, or t
  misc_feature (1262)..(1262): n is a, c, g, or t
  misc_feature (1266)..(1266): n is a, c, g, or t
  misc_feature (1281)..(1281): n is a, c, g, or t
gcaggtagaaaactggtgtcatcagctgtttctcccagcatcatacctcaagaggatccttcccagcagttcctgcagcagagccttgaaagagtgtatagtcttcagcacttggaccctcagggagcccaggagctgctggaattcaccatcagggatctgcaaagacttggagaacttcaatctgaattggcaggagtagctgatttctctgccacctatcttcgctgtcaactacttctcatcaaggccttgcagaaaagttgtggaatgtagctgcccctttgtatttgaagcagagtgatttggcctcagcagcagcgaaacagattatggaagagacctacaaaatggaattcatgtacagtggtgtggagaataagcaggtggtgattatacatcacatgaggctgcaggccaaagctttgcaacttatagtaacagcacgaactacacgaggacttgaccccttatttgggatgtgtgaaaaatttttacaggaagtagacttttttcagaggtatttcatcgctgatttgccccacttgcaggacagctttgtggacaaactccttgaccttatgccccgactcatgacatccaaacctgcagaagtggtcaaaattctacagaccatgctgcgacagagtgcctttctgcatctcccgcttccagagcagatccacaaagcctcagccaccatcatcgagccagcgggcgagtcagacaaccctttgcggtttacctctgggttggtggttgccctggatgttgatgcaaccctggagcatgtgcaggatcctcanaacactgttaaggtccaggtctaatatccagatggccaggctcanangattcnccccaagcctgcanacttccngnaatcctggcccagggcggcaccggctcatcacncaggnttatcnctcccncnccgcttggacanaggcctgccaggngnaantgaagnntgctgctggncctanactccnggnccccattcnaaaaggcccctgaagggagggggngaaagntccccccgggggaaaccncnatcggnggcccnttnccttcanaagccggnaaaatttaataatgcccaacctgcccgggctaggaaaaananncttccnaccgggncaaaaggccccttnagggccaaangancnnccngaacccctccccgaatnngggnagcttaagaatggnccntcccccntcggnaaaancgaaaatttttctttaaaaaaaaancttanttntccntccccgccaaagggnaaacc

SEQ ID NO: 651 - DNA, 1110 bp, Homo sapiens
  misc_feature (784)..(784): n is a, c, g, or t
  misc_feature (888)..(888): n is a, c, g, or t
  misc_feature (894)..(894): n is a, c, g, or t
  misc_feature (898)..(898): n is a, c, g, or t
  misc_feature (903)..(903): n is a, c, g, or t
  misc_feature (911)..(911): n is a, c, g, or t
  misc_feature (917)..(917): n is a, c, g, or t
  misc_feature (923)..(923): n is a, c, g, or t
  misc_feature (925)..(925): n is a, c, g, or t
  misc_feature (938)..(938): n is a, c, g, or t
  misc_feature (941)..(941): n is a, c, g, or t
  misc_feature (944)..(944): n is a, c, g, or t
  misc_feature (956)..(956): n is a, c, g, or t
  misc_feature (964)..(964): n is a, c, g, or t
  misc_feature (967)..(968): n is a, c, g, or t
  misc_feature (981)..(981): n is a, c, g, or t
  misc_feature (989)..(989): n is a, c, g, or t
  misc_feature (996)..(996): n is a, c, g, or t
  misc_feature (1001)..(1001): n is a, c, g, or t
  misc_feature (1005)..(1005): n is a, c, g, or t
  misc_feature (1008)..(1008): n is a, c, g, or t
  misc_feature (1010)..(1010): n is a, c, g, or t
  misc_feature (1014)..(1014): n is a, c, g, or t
  misc_feature (1023)..(1023): n is a, c, g, or t
  misc_feature (1036)..(1036): n is a, c, g, or t
  misc_feature (1039)..(1039): n is a, c, g, or t
  misc_feature (1044)..(1044): n is a, c, g, or t
  misc_feature (1049)..(1049): n is a, c, g, or t
  misc_feature (1052)..(1053): n is a, c, g, or t
  misc_feature (1066)..(1066): n is a, c, g, or t
  misc_feature (1070)..(1070): n is a, c, g, or t
  misc_feature (1087)..(1087): n is a, c, g, or t
  misc_feature (1101)..(1101): n is a, c, g, or t
  misc_feature (1105)..(1106): n is a, c, g, or t
gccagaatgcttcagaagaatggattacctttactgagcaaagtcaactagaggcggacaaggctatagaagttttgctcacagcacctacagggaaagcagctggcttactaagacagaaaactggtcttcatgcctacacactgtgtcaggtcaattatagcttctattcatggactcaaacaatgatgaccacaaacaaaccatggaaattttcttcggttagagttctggttgtggatgaagggagtttggtatctgtaggaatcttcaaatcggtcttaaatttattgtgtgagcactccaaactttctaagcttattatccttggtgacattagacagttacccagtattgaacctggtaacttgctgaaagatctttttgagactcttaagtcaagaaattgtgctattgagctaaagacaaaccatagagcagaatctcagctcattgtggacaatgctacaagaatctcaagacgccaatttccaaaatttgatgcagaactaaatatctctgataatccaacattacccatctcaattcaagataagacatttatttttgtcaggctcccagaagaggatgccagttctcagtcatctaaaactaatcatcactcttgtttatattctgcagttaaaactttactacaagaaaataacttacaaaatgcaaaaacatcacaatttattgcatttagaaggcaagactgtgatctaattaatgactgctgctgcaaacactacacaggccacctcaccaaagaccatcagagtanacttgtttttggaattggggataaaatttgttgtaccaggaatgcatacctctcaaacttactacctgaaaatatctctggaagtcagcaaaataatgatctanatgccngtantgaanacttttcngggacncttccngnattttgctaaaanaancgngactttgaaagnaacgttcnacnngcaatggaaaaanattttccnaacaaangaggnaccngangnaacntttggaaanaaaaaatccttgnacnttaanaaaanggnnggggccgggaaanaacngggggaatttaaaaaancaaaggaaaattgncccnnaaaa

SEQ ID NO: 652 - DNA, 1139 bp, Homo sapiens
  misc_feature (814)..(814): n is a, c, g, or t
  misc_feature (828)..(828): n is a, c, g, or t
  misc_feature (842)..(842): n is a, c, g, or t
  misc_feature (859)..(859): n is a, c, g, or t
  misc_feature (876)..(876): n is a, c, g, or t
  misc_feature (879)..(879): n is a, c, g, or t
  misc_feature (887)..(887): n is a, c, g, or t
  misc_feature (896)..(896): n is a, c, g, or t
  misc_feature (905)..(905): n is a, c, g, or t
  misc_feature (912)..(912): n is a, c, g, or t
  misc_feature (919)..(919): n is a, c, g, or t
  misc_feature (927)..(927): n is a, c, g, or t
  misc_feature (935)..(935): n is a, c, g, or t
  misc_feature (956)..(956): n is a, c, g, or t
  misc_feature (959)..(959): n is a, c, g, or t
  misc_feature (961)..(961): n is a, c, g, or t
  misc_feature (964)..(965): n is a, c, g, or t
  misc_feature (968)..(969): n is a, c, g, or t
  misc_feature (973)..(973): n is a, c, g, or t
  misc_feature (1003)..(1004): n is a, c, g, or t
  misc_feature (1012)..(1012): n is a, c, g, or t
  misc_feature (1024)..(1024): n is a, c, g, or t
  misc_feature (1027)..(1029): n is a, c, g, or t
  misc_feature (1042)..(1042): n is a, c, g, or t
  misc_feature (1067)..(1067): n is a, c, g, or t
  misc_feature (1072)..(1073): n is a, c, g, or t
  misc_feature (1082)..(1082): n is a, c, g, or t
  misc_feature (1085)..(1086): n is a, c, g, or t
  misc_feature (1096)..(1096): n is a, c, g, or t
  misc_feature (1106)..(1106): n is a, c, g, or t
  misc_feature (1118)..(1120): n is a, c, g, or t
  misc_feature (1124)..(1124): n is a, c, g, or t
  misc_feature (1133)..(1133): n is a, c, g, or t
gtgccatttaaacgacaggctctagtggaatttgaaaacatagatagtgccaaagaatgtgtgacatttgctgcagatgaacccgtgtacattgctggtcaacaggcttttttcaactattctacaagcaaaaggatcactcggccaggaaatactgatgatccatcaggaggcaacaaagttcttctgctctcaattcagaatccgctttatccaattacagtggatgttttatatactgtatgcaaccctgttggcaaagtgcaacgtattgttatattcaagagaaatgggatacaagcaatggttgagtttgaatcagtcctttgtgcccagaaagctaaagcagcactcaatggagctgatatatatgctggatgttgcacactaaaaattgaatatgcacggccaactcgtctaaatgttattaggaatgacaatgacagttgggactacactaaaccatatttgggaagacgagatagaggaaagggtcgccagagacaagccattttgggagaacacccttcttcgtttagacatgatggctatggatcccatggtccattattgcctttaccaagtcgttacagaatgggctctcgagatacacctgaacttgttgcttatccattaccacaggcttcttcctcttacatgcatggaggaaatccctctggttcagttgtaatggtttagtggattacatcaactaaaaatgaattgttcaagagtcttcaacctgttctgcttatatggaaaatattgagaaggtaaaatttatgaagaccattcctggtacagccactggtanaaatgggtgatgantatgctgtaaaaanagctgtcaccccccctnaaaaatgtccaaattanttngggaaaanacctaatgnttgccgtgnccaaacnacattcnagttgttnccaagtcnaaaattttgaaccgggagganggnanccnnccnncctnccaaaatttttccaatgaaccaaaaaaaannccctttanaagggccggccnagnnnccaaaaaaaaaanccccccccccccccggggttttgcnataannaaaaaggtnccnntggggggccnaaaaaaaccntcccaaaatttnnnaagnccccggaanttttcc

SEQ ID NO: 653 - DNA, 1087 bp, Homo sapiens
  misc_feature (691)..(691): n is a, c, g, or t
  misc_feature (739)..(739): n is a, c, g, or t
  misc_feature (745)..(745): n is a, c, g, or t
  misc_feature (759)..(759): n is a, c, g, or t
  misc_feature (766)..(766): n is a, c, g, or t
  misc_feature (798)..(798): n is a, c, g, or t
  misc_feature (808)..(808): n is a, c, g, or t
  misc_feature (816)..(816): n is a, c, g, or t
  misc_feature (828)..(828): n is a, c, g, or t
  misc_feature (830)..(830): n is a, c, g, or t
  misc_feature (878)..(878): n is a, c, g, or t
  misc_feature (900)..(900): n is a, c, g, or t
  misc_feature (911)..(911): n is a, c, g, or t
  misc_feature (916)..(916): n is a, c, g, or t
  misc_feature (922)..(922): n is a, c, g, or t
  misc_feature (924)..(924): n is a, c, g, or t
  misc_feature (946)..(947): n is a, c, g, or t
  misc_feature (961)..(961): n is a, c, g, or t
  misc_feature (970)..(970): n is a, c, g, or t
  misc_feature (976)..(976): n is a, c, g, or t
  misc_feature (981)..(981): n is a, c, g, or t
  misc_feature (988)..(988): n is a, c, g, or t
  misc_feature (1010)..(1010): n is a, c, g, or t
  misc_feature (1015)..(1016): n is a, c, g, or t
  misc_feature (1027)..(1027): n is a, c, g, or t
  misc_feature (1033)..(1033): n is a, c, g, or t
  misc_feature (1038)..(1038): n is a, c, g, or t
  misc_feature (1041)..(1041): n is a, c, g, or t
  misc_feature (1045)..(1045): n is a, c, g, or t
  misc_feature (1051)..(1051): n is a, c, g, or t
  misc_feature (1054)..(1054): n is a, c, g, or t
  misc_feature (1061)..(1061): n is a, c, g, or t
  misc_feature (1071)..(1071): n is a, c, g, or t
  misc_feature (1075)..(1075): n is a, c, g, or t
  misc_feature (1080)..(1080): n is a, c, g, or t
gcacttcccccagcaggccgtcatgctgcatactctgtaggttgggagatggcacctgcgggggcacctgggcccggccgcctggtagcccagctggacacagagggtgtgggcagcctgggccctggctatgagggccgacacattgccatggagaaggtggcatccagaacataccggctacggctagaggctgccaggcctggtgatgcgggcacctaccgctgcctcgccaaagcctatgttcgagggtctgggacccggcttcgtgaagcagccagtgcccgttcccggcctctccctgtacacgtgcgggaggaaggtgagagggggctgggccctggacggggttcgaggattgtcaaccccttttccttctgtttccatgacccctccctctccgtcagctgtttgcaggccacagcctcacgctcctcttctaccaagattgtgggaataccctgagtttcctggggcggtgcttggcggcagccctaaccccatgctccctggccctgcaccctctgaccccatgtcctttgttctgcaggtgtggtgctggaagctgtggcatggctagcaggaggcacagtgtaccgcggggagactgcctccctgctgtgcaacatctctgtgcggggtggccccccaggactgcggctggccgccagctggtgggtggagcgaccanaggacggagagctcagctctgtccctgcccagctggtgggtggcgtangccagnatggtgtggcaaanctgggantccggcctggaagaagccctgtcaacgtaaanctggtggggnccccgaanccatcggctganantacacacttggggccccaagaataaaggcgtgtacactgtgcccccancgcctgggtgcaacatgccaantaaaagctggnacaangcgggnantgcccgctcaggcctgttaaannctaaccctaaatgnatgcctggnaaaccnaattnggccctngctgggggaaaaggggtggccnaatcnnggggccaatgncttggnaacanaanttgntgcttnaanaaaaagncttcaaaaangggnatccntttaccc

SEQ ID NO: 654 - DNA, 1045 bp, Homo sapiens
  misc_feature (755)..(755): n is a, c, g, or t
  misc_feature (827)..(827): n is a, c, g, or t
  misc_feature (843)..(843): n is a, c, g, or t
  misc_feature (854)..(854): n is a, c, g, or t
  misc_feature (859)..(859): n is a, c, g, or t
  misc_feature (869)..(869): n is a, c, g, or t
  misc_feature (877)..(877): n is a, c, g, or t
  misc_feature (889)..(889): n is a, c, g, or t
  misc_feature (905)..(905): n is a, c, g, or t
  misc_feature (913)..(913): n is a, c, g, or t
  misc_feature (921)..(921): n is a, c, g, or t
  misc_feature (932)..(932): n is a, c, g, or t
  misc_feature (953)..(953): n is a, c, g, or t
  misc_feature (966)..(966): n is a, c, g, or t
  misc_feature (973)..(973): n is a, c, g, or t
  misc_feature (976)..(976): n is a, c, g, or t
  misc_feature (978)..(978): n is a, c, g, or t
  misc_feature (983)..(983): n is a, c, g, or t
  misc_feature (985)..(987): n is a, c, g, or t
  misc_feature (997)..(997): n is a, c, g, or t
  misc_feature (1001)..(1001): n is a, c, g, or t
  misc_feature (1006)..(1006): n is a, c, g, or t
  misc_feature (1008)..(1008): n is a, c, g, or t
  misc_feature (1014)..(1014): n is a, c, g, or t
  misc_feature (1017)..(1017): n is a, c, g, or t
  misc_feature (1023)..(1024): n is a, c, g, or t
  misc_feature (1035)..(1035): n is a, c, g, or t
gggaaacgcaagtgcctgcgagagggcttcatcactgaggactgggaccagcccgtggccgactggaagatcttctacttcttacggagcctgcacaggaacctcctgcacaacccgtgcgctgaagaggggttcgagttctggagcctggatgtgaatggaggcgatgagtggaaggtggaggatctctctcgagaccagaggaaggaattccccaatgaccaggtcaagaaatacttcgttacttcatattagtaagatccggggacttggggtaggggaaagcccaaatcaatttaccctggggtctctcccaccctggaaggggcagtcctagcccctcactgccctagtggtgagcccagcccctcccacccctctgcctgcccccagcacctgcctcaagtcccaggtggtggacctcaaggccgaagggtattgggaggagctgatggataccacacggccggacatcgaggtcaaggactggttcgcagccaggccagattgcgggtccaagtaccagctgtgcgttcagctcctgtcgtccgcgcacgcgcctctggggaccttccagccagacccggcgaccatccagcagaagagcgatgccaagtggagggaggtctcccacacattctccaactacccgcccggcgtccgctacatctggtttcagcacggcggcgtggacactcattactgggccggctggtacggcccgagggtcaccaacagcagcatcaccatcgggnccccgctgccctgacaccccctgagcccccatctgctgaaccctgactggtaaacaactgctgtcaaaaaanggctgggcttgggaangggaagtggangccangtgtccccanacctctanccttgcccctancacctctttttgtgancctctcangggggcanccctcccatgntggggtcgggccactctcccnaaagtcttgactnatgatgnccngnaaccngnnnggccctttcnaaangaacncngaaatnggnagggcnntgttccctggnccctcaaaat

SEQ ID NO: 655 - DNA, 1123 bp, Homo sapiens
  misc_feature (743)..(743): n is a, c, g, or t
  misc_feature (814)..(814): n is a, c, g, or t
  misc_feature (916)..(916): n is a, c, g, or t
  misc_feature (923)..(923): n is a, c, g, or t
  misc_feature (926)..(926): n is a, c, g, or t
  misc_feature (938)..(938): n is a, c, g, or t
  misc_feature (944)..(944): n is a, c, g, or t
  misc_feature (959)..(959): n is a, c, g, or t
  misc_feature (962)..(962): n is a, c, g, or t
  misc_feature (975)..(975): n is a, c, g, or t
  misc_feature (992)..(992): n is a, c, g, or t
  misc_feature (995)..(995): n is a, c, g, or t
  misc_feature (999)..(999): n is a, c, g, or t
  misc_feature (1005)..(1005): n is a, c, g, or t
  misc_feature (1009)..(1009): n is a, c, g, or t
  misc_feature (1028)..(1029): n is a, c, g, or t
  misc_feature (1034)..(1034): n is a, c, g, or t
  misc_feature (1038)..(1038): n is a, c, g, or t
  misc_feature (1045)..(1045): n is a, c, g, or t
  misc_feature (1056)..(1056): n is a, c, g, or t
  misc_feature (1061)..(1061): n is a, c, g, or t
  misc_feature (1068)..(1068): n is a, c, g, or t
  misc_feature (1075)..(1075): n is a, c, g, or t
  misc_feature (1084)..(1084): n is a, c, g, or t
  misc_feature (1089)..(1089): n is a, c, g, or t
  misc_feature (1099)..(1100): n is a, c, g, or t
  misc_feature (1108)..(1123): n is a, c, g, or t
ggcggttctcgacgtgccgccaatcttcgaacgcaggtctgtgatcatccgcagactccgaaaaagggttcgaggaacgcgcctgctcccctcgtcgcagtttccagcccgacgagcttgttttgtcccggactcggtgcccctgtagacaatggccctcgtgtctgccgattcccgcattgcagaacttctcacagagctccatcagctgatcaaacaaacccaggaagagcgttcgcggagcgaacacaacttagtgaacatccagaagacccatgagcggatgcagacagagaacaagatttctccctattaccggacaaagctgcgtggcctctacacaaccgccaaggccgatgcagaggctgagtgcaacatccttcggaaagctctggacaagatcgcggaaatcaagtctctgttggaagagaggcggattgcggccaagattgccggtctctacaatgactcggagccaccccggaagaccatgcgcagaggggtgctgatgaccctgctgcagcagtcggccatgaccctgcccctgtggatcgggaagcctggtgacaagcccccacccctctgtggggccatccctgcctcaggagactacgtggccagacctggagacaaggtggctgcccgggtgaaggccgtggatggggacgagcagtggatcctggccgaggtggtcagttacagccatgccaccaacaagtatgaggtagatgacatcgatgaanaaggcaaagagagacacaccctgagccggcgccgtgtcatcccgctgccccagtggaaggccaacccgganacggaccctgaggccttgttccaaaaggagcagctcgtgctggcctgtatccccaaactacctgcttctaccgcgccctgatccatgcgcccccacagcggncccagangantactcggtctgnttgaanaccctcctaagcaanggntattcccctcccnccaaggggctcaaaggnacngggngcttgnaagnacccaaaaaaatggatgcnnctggnaaanccccctnccccaagaaanagggnagaaaanaaaaaangggtggatnaaacnattccccctnnaaaaaaannnnnnnnnnnnnnnn

SEQ ID NO: 656 - DNA, 900 bp, Homo sapiens
  misc_feature (804)..(804): n is a, c, g, or t
  misc_feature (849)..(849): n is a, c, g, or t
  misc_feature (860)..(860): n is a, c, g, or t
gagctgttagaaggttacctcaaagaaattggaattaatgaagatcaatttcaagaagcatgcacttctcctcttgcaaagacccatacatcacaggccattttgcaacctgtgttggcagcagaagattttactatctttaaagcaatgatggtccagaaaaacattgaaatgcagctgcaagccattcgaataattcaagagagaaatggtgtattacctgactgcttaaccgatggctctgatgtggtcagtgaccttgaacacgaagagatgaaaatcctgagggaagttcttagaaaatcaaaagaggaatatgaccaggaagaagaaaggaagaggaaaaaacagttatcagaggctaaaacagaagagcccacagtgcattccagtgaagctgcaataatgaataattcccaaggggatggtgaacattttgcacacccaccctcagaagttaaaatgcattttgctaatcagtcaatagaacctttgggaagaaaagtggaaaggtctgaaacttcctccctcccacaaaaaggcctgaagattcctggcttagagcatgcgagcattgaaggaccaatagcaaacttatcagtacttggaacagaagaacttcggcaacgagaacactatctcaagcagaagagagataagttgatgtccatgagaaaggatatgaggactaaacagatacaaaatatggagcagaaaggaaaacccactggggaggtagaggaaaatgacagagaaaccagaaatgacagcagaggagaagccaacattactaaagaggagatngcttgcagagaactcaagaagaagttattaataagtaataattangaccatttacnaaatggaagttcaattgtcttaaaataattattagtcctt

SEQ ID NO: 657 - DNA, 1078 bp, Homo sapiens
  misc_feature (715)..(715): n is a, c, g, or t
  misc_feature (780)..(780): n is a, c, g, or t
  misc_feature (784)..(784): n is a, c, g, or t
  misc_feature (786)..(786): n is a, c, g, or t
  misc_feature (792)..(792): n is a, c, g, or t
  misc_feature (795)..(795): n is a, c, g, or t
  misc_feature (830)..(830): n is a, c, g, or t
  misc_feature (844)..(844): n is a, c, g, or t
  misc_feature (866)..(866): n is a, c, g, or t
  misc_feature (868)..(868): n is a, c, g, or t
  misc_feature (880)..(880): n is a, c, g, or t
  misc_feature (883)..(883): n is a, c, g, or t
  misc_feature (895)..(895): n is a, c, g, or t
  misc_feature (901)..(901): n is a, c, g, or t
  misc_feature (906)..(906): n is a, c, g, or t
  misc_feature (915)..(915): n is a, c, g, or t
  misc_feature (939)..(939): n is a, c, g, or t
  misc_feature (942)..(942): n is a, c, g, or t
  misc_feature (949)..(949): n is a, c, g, or t
  misc_feature (961)..(961): n is a, c, g, or t
  misc_feature (966)..(966): n is a, c, g, or t
  misc_feature (975)..(975): n is a, c, g, or t
  misc_feature (978)..(978): n is a, c, g, or t
  misc_feature (982)..(982): n is a, c, g, or t
  misc_feature (1000)..(1000): n is a, c, g, or t
  misc_feature (1017)..(1017): n is a, c, g, or t
  misc_feature (1029)..(1029): n is a, c, g, or t
  misc_feature (1035)..(1035): n is a, c, g, or t
  misc_feature (1038)..(1038): n is a, c, g, or t
  misc_feature (1051)..(1052): n is a, c, g, or t
  misc_feature (1060)..(1061): n is a, c, g, or t
  misc_feature (1064)..(1064): n is a, c, g, or t
  misc_feature (1066)..(1066): n is a, c, g, or t
  misc_feature (1068)..(1068): n is a, c, g, or t
gcccacgcgtccggggacaacggccacctgtaccgggaggaccagacctcccccgcgccgggcctccgctgcctcaactggctggacgcgcagagcgggctggcctcggcccccgtgtcgggggccggcaatcacagttactgccgaaacccggacgaggacccgcgcgggccctggtgctacgtcagtggcgaggccggcgtccctgagaaacggccttgcgaggacctgcgctgtccagagaccacctcccaggccctgccagccttcacgacagaaatccaggaagcgtctgaagggccaggtgcagatgaggtgcaggtgttcgctcctgccaacgccctgcccgctcggagtgaggcggcagctgtgcagccagtgattgggatcagccagcgggtgcggatgaactccaaggagaaaaaggacctgggaactctggggggaaggatttgaaagaacagcatgatcagaaagtatgtgagagggagatgcagcgaatcactctgcccttgtctgccttcaccaaccccacctgtgagattgtggatgagaagactgtcgtggtccacaccagccagactccagttgaccctcaggagggcaccaccccccttatgggccaggccgggactcctggggcctgagcccccccagtgggcaggagcccatgcagacactggtgcaggacagcccaccctcctacagctaggangaactaccactttgtgttctggttaaaaccctaccactccccccgctttttttggcgaatcctantaanantgacanaancaggtggccctgtgggctgaagggtaaggctgggntagggtcctaacantgctccttgtccatcccttggnancaaatttttttnttntggatggaaaanagtggncaacntccccacantgaatgcttgcttgctaaggggcnttnccaaaanatttgccttgcnccccntggaaactnaanccangggataaaacggggaacntccccccaggcttcctntgtggttttaanaaaaanggncctcaattttccnnttgggggnnttnantnggcaaaaacc

SEQ ID NO: 658 - DNA, 534 bp, Homo sapiens
  misc_feature (390)..(390): n is a, c, g, or t
  misc_feature (402)..(402): n is a, c, g, or t
  misc_feature (415)..(415): n is a, c, g, or t
  misc_feature (462)..(462): n is a, c, g, or t
  misc_feature (467)..(467): n is a, c, g, or t
  misc_feature (472)..(472): n is a, c, g, or t
  misc_feature (504)..(505): n is a, c, g, or t
  misc_feature (509)..(509): n is a, c, g, or t
  misc_feature (511)..(511): n is a, c, g, or t
  misc_feature (515)..(517): n is a, c, g, or t
  misc_feature (525)..(525): n is a, c, g, or t
  misc_feature (531)..(532): n is a, c, g, or t
ggagagcctgtgtccctggggaaagccgactctgcaccttccagaaaaacggagtccccatccttggggaaggtggtccccctgagtctggagaagaccaagccgtcctcctcctccaggcagttagaccgcaaagccctcggctcagcccggtctcccgagggtgccaggggcagtgaaggccgcgtggagccgaaggccgagcccgtgtccagcaccgaggcctccagtctcggccagaaagacctggaagccgctggggccgagagaagcccctgcccagaggccgcagcgcccccgccggggccgcggactcgcgacaacttcaccaaggcgccgtcgtgggaggcgagcgccccgccgccgccgcgcgaggacgcgggcactcangcgggcgcgcangcctgcgtctcantggccgtgagccccatgtctccgcaggacggcgctgggggctcggcnttcancttcnaggcggcgccgcgcgcgcccagcccgccctcnngccnanatgnnntcctgcantgttcnntg

SEQ ID NO: 659 - DNA, 1005 bp, Homo sapiens
  misc_feature (809)..(809): n is a, c, g, or t
  misc_feature (826)..(826): n is a, c, g, or t
  misc_feature (829)..(829): n is a, c, g, or t
  misc_feature (834)..(834): n is a, c, g, or t
  misc_feature (849)..(849): n is a, c, g, or t
  misc_feature (855)..(855): n is a, c, g, or t
  misc_feature (859)..(859): n is a, c, g, or t
  misc_feature (866)..(866): n is a, c, g, or t
  misc_feature (874)..(874): n is a, c, g, or t
  misc_feature (893)..(893): n is a, c, g, or t
  misc_feature (899)..(899): n is a, c, g, or t
  misc_feature (907)..(907): n is a, c, g, or t
  misc_feature (914)..(914): n is a, c, g, or t
  misc_feature (930)..(930): n is a, c, g, or t
  misc_feature (932)..(932): n is a, c, g, or t
  misc_feature (951)..(951): n is a, c, g, or t
  misc_feature (956)..(957): n is a, c, g, or t
  misc_feature (961)..(963): n is a, c, g, or t
  misc_feature (970)..(970): n is a, c, g, or t
  misc_feature (975)..(975): n is a, c, g, or t
  misc_feature (981)..(981): n is a, c, g, or t
  misc_feature (985)..(985): n is a, c, g, or t
  misc_feature (987)..(987): n is a, c, g, or t
  misc_feature (1000)..(1000): n is a, c, g, or t
  misc_feature (1002)..(1002): n is a, c, g, or t
gaaggtgacatcctgcattcacaatgtcctgagtggtcagcgctggatcgagcactatggggaggtgctcatccgaaacacacaggacagctcctgccactgcaagatcaccttctgcaaggccaagtactggagttccaatgtccacgaggtgcagggcgctgtgctcagtcggagtggccgtgtcctccaccgactctttgggaagtggcacgaggggctgtaccggggacccacgccaggtggccagtgcatctggaaacccaactcaatgccccccgaccatgagcgaaacttcggcttcacccagtttgccttggagctgaatgagctgacagcagagctgaaacggtcgctgccttccaccgacacgagactccggccagaccagaggtacctggaggaggggaacatacaggccgctgaggcccagaagagaaggatcgagcagctgcagcgagacaggcgcaaagtcatggaggaaaacaacatcgtacaccaggctcgcttcttcaggcggcagacggatagcagcgggaaagagtggtgggtgaccaacaatacctactggaggctgcgggccgagccaggctacgggaacatggatggggccgtgctctggtagccctggccccgggggcaggaggctctggttcctcactcctcctgcctccacccccctaccatgaacacatgggtgaggccgggctccccgcctcactgcccttgagaccaaaggggcagccctggccctccctcccctctgctggccagagggtctgcattctcagcccaccccccaaccccanccgtttggggtgaaaancanaatcntgtgctttcccccanttctcnttgncccaaanaaccagcnttgttaaaaccctttcccnctttcncaattccnaatttcnggtccccttttggggnantttggggaaaactctggtncccannattnnnttcccantttcnagtgcnttcnangaaaaagggaaantncct

SEQ ID NO: 660 - DNA, 908 bp, Homo sapiens
  misc_feature (726)..(726): n is a, c, g, or t
  misc_feature (729)..(729): n is a, c, g, or t
  misc_feature (786)..(786): n is a, c, g, or t
  misc_feature (803)..(803): n is a, c, g, or t
  misc_feature (814)..(814): n is a, c, g, or t
  misc_feature (849)..(849): n is a, c, g, or t
  misc_feature (856)..(856): n is a, c, g, or t
  misc_feature (863)..(863): n is a, c, g, or t
  misc_feature (884)..(884): n is a, c, g, or t
  misc_feature (897)..(897): n is a, c, g, or t
  misc_feature (902)..(902): n is a, c, g, or t
  misc_feature (906)..(906): n is a, c, g, or t
ggccagccatgcagccttggcacggaaaggccatgcagagagcttccgaggccggagccactgcccccaaggcttccgcacggaatgccaggggcgccccgatggatcccaacgagtctccggctgcccccgaggccgccctgcctaaggcgggaaagttcggccccgccaggaagtcgggatcccggcagaaaaagagcgccccggacacccaggagaggccgcccgtccgcgcaactggggcccgcgccaaaaaggcccctcagcgcgcccaggacacgcagccgtctgacgccaccagcgcccctggggcagaggggctggagcctcctgcggctcgggagccggctctttccagggctggttcttgccgccagaggggcgcgcgctgctccacgaagccaagacccccgcccgggccctgggacgtgcccagccccggcctgccggtctcggcccccattctcgtacggagggatgcggcgcctggggcctcgaagctccgggcggttttggagaagttgaagctcagccgcgatgatatctccacggcggcggggatggtgaaaggggttgtggaccacctgctgctcagactgaagtgcgactccgcgttcagaggcgtcgggctgctgaacaccgggagctactatgagcacgtgaagatttctgcacctaatgaatttgatgtcatgtttaaactggaagtccccagaattcaactanaanaatattccaaacactcgtgcatattactttgtgaaatttaaaagaaatcccaaaaanaaaatcatctgagtcanttttttaaaangtgaaatatttatcagcttctaaaatgctgtcaanttttagnaaattcnttaaggaaaaaattaacgacntttaaaaatacanatgtnttcntg

SEQ ID NO: 661 - DNA, 1030 bp, Homo sapiens
  misc_feature (785)..(785): n is a, c, g, or t
  misc_feature (819)..(819): n is a, c, g, or t
  misc_feature (823)..(823): n is a, c, g, or t
  misc_feature (851)..(851): n is a, c, g, or t
  misc_feature (856)..(856): n is a, c, g, or t
  misc_feature (873)..(873): n is a, c, g, or t
  misc_feature (877)..(877): n is a, c, g, or t
  misc_feature (879)..(879): n is a, c, g, or t
  misc_feature (886)..(886): n is a, c, g, or t
  misc_feature (888)..(888): n is a, c, g, or t
  misc_feature (890)..(890): n is a, c, g, or t
  misc_feature (893)..(893): n is a, c, g, or t
  misc_feature (903)..(903): n is a, c, g, or t
  misc_feature (909)..(909): n is a, c, g, or t
  misc_feature (912)..(912): n is a, c, g, or t
  misc_feature (937)..(937): n is a, c, g, or t
  misc_feature (945)..(946): n is a, c, g, or t
  misc_feature (957)..(957): n is a, c, g, or t
  misc_feature (959)..(959): n is a, c, g, or t
  misc_feature (982)..(982): n is a, c, g, or t
  misc_feature (995)..(995): n is a, c, g, or t
  misc_feature (997)..(997): n is a, c, g, or t
  misc_feature (1000)..(1000): n is a, c, g, or t
  misc_feature (1008)..(1008): n is a, c, g, or t
  misc_feature (1017)..(1017): n is a, c, g, or t
  misc_feature (1021)..(1021): n is a, c, g, or t
  misc_feature (1024)..(1025): n is a, c, g, or t
  misc_feature (1028)..(1028): n is a, c, g, or t
  misc_feature (1030)..(1030): n is a, c, g, or t
gtgaaggtccaggagcagatggccaactgccccaagttcgtccccgtggtgcccacatcacagcctatccccagcaacatccccaacaggtccaccttcgcctgcccgtactgtggtgcccgcaacctggaccagcaggagctggtgaagcactgtgtggaaagccaccgcagcgaccccaaccgcgtggtgtgccccatctgctcggcaatgccctggggggaccccagctacaagagcgccaacttcctgcagcacctgcttcaccgacacaagttctcctacgacacctttgtggactacagtattgacgaggaggccgccttccaggctgctctggccctgtctctctctgagaactgaagggaagcgcagccacccgcctgcgtctggggtcagggatgtccccgctcctgtgtcgcacctggcacctgctcgggagcgcacctcaccggactgagctcacaggaggagcctgcacccgcgcagaaggggagccggggccgagcctccgggcctgaatacgggccagccgccgaggccgccagagcagggccgcctggtcccaccggcgtcgctgggttcttcggtgcttctggccgagcaggcggcctacttgggcagggctggacgctgggacctggagctgccgccgtctcttcaaagccatgataccccctcgtgggaagaagggaccgacgcgcgagtcgcgctccgcagtcgagccgggaggaacccaggctgctgccctgcccagcccgaccctgcccccgccccgcttcacnttgcgcatttggtactggcttttgtgatacttangaancctggcatctttttctatattatccagnggganaatctttttcacgtttnatanancaaaaananancanttactcttcntattgnaanatctgtgtttgactaagaataaaantatttttnngggaaaatttnanaaaattatattttttaaaaaaanaaatcaaaaaaancnttngggggatnggggcaagnatgnaannaanan

SEQ ID NO: 662 - DNA, 1089 bp, Homo sapiens
  misc_feature (288)..(288): n is a, c, g, or t
  misc_feature (666)..(666): n is a, c, g, or t
  misc_feature (710)..(710): n is a, c, g, or t
  misc_feature (750)..(750): n is a, c, g, or t
  misc_feature (777)..(777): n is a, c, g, or t
  misc_feature (802)..(802): n is a, c, g, or t
  misc_feature (830)..(830): n is a, c, g, or t
  misc_feature (837)..(837): n is a, c, g, or t
  misc_feature (852)..(852): n is a, c, g, or t
  misc_feature (855)..(855): n is a, c, g, or t
  misc_feature (891)..(891): n is a, c, g, or t
  misc_feature (920)..(920): n is a, c, g, or t
  misc_feature (922)..(922): n is a, c, g, or t
  misc_feature (927)..(927): n is a, c, g, or t
  misc_feature (934)..(935): n is a, c, g, or t
  misc_feature (944)..(944): n is a, c, g, or t
  misc_feature (946)..(946): n is a, c, g, or t
  misc_feature (959)..(960): n is a, c, g, or t
  misc_feature (965)..(965): n is a, c, g, or t
  misc_feature (975)..(975): n is a, c, g, or t
  misc_feature (977)..(977): n is a, c, g, or t
  misc_feature (988)..(988): n is a, c, g, or t
  misc_feature (992)..(992): n is a, c, g, or t
  misc_feature (1001)..(1001): n is a, c, g, or t
  misc_feature (1008)..(1008): n is a, c, g, or t
  misc_feature (1018)..(1019): n is a, c, g, or t
  misc_feature (1032)..(1032): n is a, c, g, or t
  misc_feature (1037)..(1037): n is a, c, g, or t
  misc_feature (1042)..(1042): n is a, c, g, or t
  misc_feature (1070)..(1070): n is a, c, g, or t
  misc_feature (1073)..(1073): n is a, c, g, or t
  misc_feature (1075)..(1076): n is a, c, g, or t
  misc_feature (1078)..(1078): n is a, c, g, or t
  misc_feature (1081)..(1083): n is a, c, g, or t
  misc_feature (1085)..(1085): n is a, c, g, or t
  misc_feature (1088)..(1088): n is a, c, g, or t
gcccacgcgtccgccagaactgaggcttggctggactgtcccccgactccagtgctgcctgaggggcgccggagccactcggcctttggctacaatggggagctgtacatctttggtggttataatgcaaggctgaaccggcacttccatgacctctggaagtttaatcctgtgtcctttacctggaaaaagattgaaccgaaggggaaggggccatgtccccgccggcgccagtgctgctgtattgttggtgacaagattgtcctctttgggggtaccagtccatcncctgaggaaggcctgggagatgaatttgaccttatagatcattctgacttacacattttggactttagccctagtctgaagactctgtgcaaactggccgtgattcagtataacctagaccagtcctgtttgcctcatgatatcaggtgggagctgaatgccatgaccaccaacagcaatatcagtcgccccatcgtctcctcccatgggtaggaggaagtttctgccacctcccctcctgagcctgctgtcatcttcactgcccctgcccatctgtcacccacctgctcctttgacccctggacttggtatacctccatgtggagttgttgggcgagaggtgttctctgtgctgtgaaattcagtggggagctgtancggggtgggggctaggttcctccccccttgggccgaaggccccnttcccccttggtgctctgtccccatccacctccctttcanctgctcctgggcctcagctctgcccangggccagccagtttctgctgggaanggaaagggaatgggggaaaaaggaaaancaagcanttgtctgaacctcangancttccccctcccccttttgcctatcccctcccctcngcttgaaccttgaaccttgactgggaacntnaaagnaattgcnncttgttggnangaaaactccttcnnccccntcttggggangnggggaaccaanaaanaaattcccncccttcnttgagctgtnnctgtactctgaantttcnccccnctcaaaatttttaaaaaataatttaaanccncnnanaannnanaana

SEQ ID NO: 663 - DNA, 851 bp, Homo sapiens
gggctcgcggacggtggccgacaggctgcgcccgcccgcgcccggggtgatgcagttgccccccgcgctgtgcgcccgcctcgctgcggggcccggggcggcggagccgctgcctgtagagcgggatcccgcggctggggccgcgccctttcgcttcgttgcgcgccccgtgcgcttcccgcgggagcaccagttcttcgaggatggggacgtgcagcgccacctctacctccaggacgtgatcatgcaggtggccgacgtgcctgagaagcccagggtgcccgcgtttgcctgccaggtggccggctgctgccaggtgttcgatgccctggacgactacgagcaccactaccacacgctgcacggaaatgtttgctccttttgcaagcgggccttcccttccggacacctgctggacgcccacatcctggagtggcacgattcgctcttccagatcctgtctgagaggcaggacatgtatcagtgcttggtagaaggctgcacagagaagttcaagaccagcagagaccggaaggatcacatggtgaggatgcacctgtaccccgcggacttccggtttgataagccaaagaaaagcagaagcccagcctcagcagaagccccaggggacagtggagagcggtcagaaggggaggccatggaaatctgctctgagcctgtggcagcctcccctgcaccggcaggtgagaggcggatctacagacatagaataccctctaccatctgctttggtcagggtgccgctcgaggatttaaaagcaacaagaagaaaaccaaacaatgctgatagactcagaaaaggagtggggggcagtcaccactgctgggcg

SEQ ID NO: 664 - DNA, 1073 bp, Homo sapiens
  misc_feature (718)..(718): n is a, c, g, or t
  misc_feature (849)..(849): n is a, c, g, or t
  misc_feature (863)..(863): n is a, c, g, or t
  misc_feature (897)..(897): n is a, c, g, or t
  misc_feature (912)..(912): n is a, c, g, or t
  misc_feature (914)..(914): n is a, c, g, or t
  misc_feature (925)..(925): n is a, c, g, or t
  misc_feature (938)..(938): n is a, c, g, or t
  misc_feature (949)..(949): n is a, c, g, or t
  misc_feature (955)..(955): n is a, c, g, or t
  misc_feature (963)..(963): n is a, c, g, or t
  misc_feature (977)..(977): n is a, c, g, or t
  misc_feature (985)..(985): n is a, c, g, or t
  misc_feature (989)..(989): n is a, c, g, or t
  misc_feature (995)..(995): n is a, c, g, or t
  misc_feature (997)..(997): n is a, c, g, or t
  misc_feature (1001)..(1001): n is a, c, g, or t
  misc_feature (1007)..(1007): n is a, c, g, or t
  misc_feature (1010)..(1011): n is a, c, g, or t
  misc_feature (1035)..(1036): n is a, c, g, or t
  misc_feature (1039)..(1040): n is a, c, g, or t
  misc_feature (1044)..(1044): n is a, c, g, or t
  misc_feature (1047)..(1047): n is a, c, g, or t
  misc_feature (1051)..(1051): n is a, c, g, or t
  misc_feature (1054)..(1054): n is a, c, g, or t
  misc_feature (1056)..(1056): n is a, c, g, or t
  misc_feature (1061)..(1061): n is a, c, g, or t
ggcaagaatgaggtgctgcgcagcaaggtgtctcggctcacggagcggctccgcaagcgctaccccaccaacaacttcgggaactgcacgggctgctcggccaccttctcagtgctgaagaagaggcggagctgcagtaattgtggaaacagcttctgctctcgatgctgctccttcaaggtgcccaagtcctccatgggggccacagcccctgaagcccagagggagactgtgtttgtgtgtgcctcgtgtaaccagaccttgagcaagtgagaagagaggccagggtccaaccaggcacccgtccttggggccagcagtagaccccccactctccccacccctggcccactgtggtgtgtgctgggcaaatgtggcctgaatgctaggtaggcttccccttccttcctcactctctccagctggattctggagctgttctccatccatgagagtggctggcaatggctgctctcaatcccttgagggagaagagcccctggagggcctggcatgtttgccctgctctgcctgggactgagcgagtggacttagggctgggcaggcagtagccaccagagggcagcagcgaactaggccaggcctgactggggtctgaagatcagggtcagtgtggctatgcctgggaattccagacctgaggttgggaaaagaggtttttctcctgcagggtactgggccaggccctcagcctcanagagcctgcagaagggcttgggagtgccacaccccatctctgctgattgaatgtccctccaggcaccaggatctcatcatttccccatcaaaaggtgtggccaggcctaacaaaaccatgggtgcttctanaaacagggttgaanttcccaaattcctgaaagaaaatgtgtatagganggtttggctgaatcntncacgttaatgnagaaagcttgggnaaccccaatanctgganaaactcancctcccctcaaaancctcaatncaanaatctnanccanaaatgnccnntgtccccactccctggaaaactgnnggnnttgnatnaaanttngnacctntgtcaaaattag

SEQ ID NO: 665 - DNA, 933 bp, Homo sapiens
gaattacaggacctcactgatgttcagatcatggctcgtctgcaagaagaaagtctcaggcaagattatgcttctacttcagcatctgtatcaagacatagttccagtgtgtcattgagttcaggaaaaaaagggacatgtagtgatcaagaatatgaccaatacagtctggaggatgaagaggaatttgatcatttgccaccacctcagcctcgtcttccaagatgttcccctttccaaagaggaattccccattcacagactttctccagcattcgggagtgtaggaggagccccagttcccagtattttccttcaaataattaccagcagcaacagtattattcacctcaagcccaaactccagatcagcaaccaaataggaccaatggagataagctccgaagaagtatgcctaacctagcccggatgccaagtacaactgccattagtagcaacattagttctccggtcaccgtgcgaaatagtcagagttttgactcaagcttgcatggagctggaaatggaatttcaagaatacaatcttgtattccatcaccgggacagcttcaacacagggtccacagcgtggggcatttcccagtgtctatccgacagcctcttaaagccacagcctatgtgagtccaaccgttcaaggcagcagtaacatgcctttatcaaacggcttacagctgtattccaacacaggaatccccacaccgaacaaagctgcagcttctgggataatgggtcgcagtgcactcccaagaccttcgttggcaataaatgggagtaacctgcctcgaagcaaaattgcacaacctgttagaagttttcttcagcctccaaagcctctgtcttcactcagcactctgagggatggaaattggagagatggttgctactaatgcagttttatgtaccctttgaaa

SEQ ID NO: 666 - DNA, 865 bp, Homo sapiens
  misc_feature (785)..(785): n is a, c, g, or t
  misc_feature (832)..(832): n is a, c, g, or t
  misc_feature (843)..(865): n is a, c, g, or t
gggaagatggctgccgcctgggggtcgtccctaacggccgcgacgcagagagcggtcactccctggccgaggggcaggctcctcacggcctccctgggaccccaggcgcgtcgggaggcgtcgtcctccagccccgaggccggcgaagggcagatccgcctcacagacagttgcgtccagaggcttttggaaatcaccgaagggtcagaattcctcaggctgcaagtggagggaggtggatgctccggattccaatacaaattttcactggatacagttatcaaccccgacgacagggtatttgaacagggtggggcaagagtggtggttgactctgatagcttggccttcgtgaaaggggcccaggtggacttcagccaagaactgatccgaagctcatttcaagtgttgaacaatcctcaagcacagcaaggctgctcctgtgggtcatctttctctatcaaactttgatgtgatgactggtgactctgggattgtcaccagttgtaccaatttgaagaacctggaattagtagaattctagaagtttacttctaatcatgtccctctcaattttatttcccgcagtccaggagtgttatgttttgccactattattttcagaatgtgaagattttactcttggcttaatttttccctccactcagtgctaaggctgagcctccagatgctgttacctcagatttaatcactggttgaaactccgtataatctgtagagcctccatggctctaaaatttggaattaacttctcttgccttaanagctgcttgtacatatgtggatagctatgtataaaagcttcattttnaagagaaaaannnnnnnnnnnnnnnnnnnnnnn

SEQ ID NO: 667 - DNA, 681 bp, Homo sapiens
  misc_feature (296)..(296): n is a, c, g, or t
  misc_feature (371)..(371): n is a, c, g, or t
  misc_feature (390)..(390): n is a, c, g, or t
  misc_feature (395)..(395): n is a, c, g, or t
  misc_feature (409)..(409): n is a, c, g, or t
  misc_feature (428)..(428): n is a, c, g, or t
  misc_feature (457)..(458): n is a, c, g, or t
  misc_feature (469)..(469): n is a, c, g, or t
  misc_feature (496)..(496): n is a, c, g, or t
  misc_feature (499)..(499): n is a, c, g, or t
  misc_feature (515)..(515): n is a, c, g, or t
  misc_feature (551)..(551): n is a, c, g, or t
  misc_feature (581)..(581): n is a, c, g, or t
  misc_feature (584)..(584): n is a, c, g, or t
  misc_feature (603)..(603): n is a, c, g, or t
  misc_feature (610)..(610): n is a, c, g, or t
  misc_feature (624)..(624): n is a, c, g, or t
  misc_feature (630)..(630): n is a, c, g, or t
  misc_feature (634)..(634): n is a, c, g, or t
  misc_feature (639)..(639): n is a, c, g, or t
  misc_feature (641)..(641): n is a, c, g, or t
  misc_feature (645)..(645): n is a, c, g, or t
  misc_feature (652)..(652): n is a, c, g, or t
  misc_feature (657)..(657): n is a, c, g, or t
  misc_feature (667)..(668): n is a, c, g, or t
  misc_feature (671)..(671): n is a, c, g, or t
  misc_feature (674)..(674): n is a, c, g, or t
  misc_feature (678)..(678): n is a, c, g, or t
gctcgcacatgcccgagccgcagccccgcgagcaggcagcgccggccccccgccccgcggccccgggccccggctccggcgccgtccctcctccccggccgggcgccgcggccccggcatgaggagcgggcgatgatccccgccaacgcctccgccaggaaggggcccgagggcaagtatccgctgcactacctcgtgtggcacaaccgccaccgcgagctggagaaggaggtccgcgcgggccaggtggacatcgagcagctggatccccgcggccggactcccctgcacctggncaccacgctggggcaccttgagtgtgcccgtgtgctcctggcgcacggcgcagacgtgggcagggagaatcgcancggctggacagtgctccangaggntgtgagtacccggntacctggagctggtgcagntggtgcttcggtaccgggactaccagcgnntggtgaagcgnctggcgggcatccccgtgctcctgganaanctgcgcaaggcccagntacttctacgttggagatgaaatgggagttcactanctgggtgcccctggtgtccaagatctgccntantgacacctacaaagtgtgnaaaaatnggccagaacctganggtaanacancacantnctgnggctttnaccanatgaacctgnnagngangganccg

SEQ ID NO: 668 - DNA, 949 bp, Homo sapiens
  misc_feature (625)..(625): n is a, c, g, or t
  misc_feature (649)..(649): n is a, c, g, or t
  misc_feature (711)..(711): n is a, c, g, or t
  misc_feature (740)..(740): n is a, c, g, or t
  misc_feature (755)..(755): n is a, c, g, or t
  misc_feature (759)..(759): n is a, c, g, or t
  misc_feature (780)..(780): n is a, c, g, or t
  misc_feature (787)..(787): n is a, c, g, or t
  misc_feature (796)..(796): n is a, c, g, or t
  misc_feature (800)..(800): n is a, c, g, or t
  misc_feature (815)..(815): n is a, c, g, or t
  misc_feature (838)..(838): n is a, c, g, or t
  misc_feature (848)..(848): n is a, c, g, or t
  misc_feature (870)..(870): n is a, c, g, or t
  misc_feature (877)..(877): n is a, c, g, or t
  misc_feature (879)..(879): n is a, c, g, or t
  misc_feature (884)..(885): n is a, c, g, or t
  misc_feature (893)..(893): n is a, c, g, or t
  misc_feature (904)..(905): n is a, c, g, or t
  misc_feature (910)..(910): n is a, c, g, or t
  misc_feature (913)..(913): n is a, c, g, or t
  misc_feature (925)..(926): n is a, c, g, or t
  misc_feature (933)..(933): n is a, c, g, or t
  misc_feature (935)..(935): n is a, c, g, or t
  misc_feature (939)..(943): n is a, c, g, or t
  misc_feature (948)..(949): n is a, c, g, or t
gagaggctgggcgtgcagccgccgccgcagagccggagcgggggccgccggcgccgcatccctctctacctgccaacatcctgtattagagaacttgtggccggaggtgtggctgtggagagctggccggggagggacgctgctcagctgctgctctgctcctgtctcctgtcccctcccccggtcatgacagagacccgtgagccagctgagactgggggctacgccagcttggaagaagatgatgaagacctttccccaggccccgagcattcctctgattcagaatacactctctcagagccggactccgaagaggaagaagatgaggaggaggaggaagaggagaccactgacgatcctgaatatgatcctggctacaaggtgaagcagcgccttggcgggggccgtggtggcccatcccgccgggccccccgtgcagcccagcccccggcccagccttgccagctctgtggccgctcaccccttggggaggccccaccgggaaccccaccctgccggctctgctgccctgctacagccccccaggaagcaccagcccctgaaggcagggccctcggggaggaagaggaggaaccacctcgggctggggagggccgaccanctgggcgggaggaggaggaggaanaggaggaggagggaacctaccactgtacggaatgtgaggattccttcgacaacctggggganctgcacgggcacttcatgctgcatgcccngggtgaggtgtaggnagancccccatacggggaagcttgnccaaaangggttgggntggnaagaggggccttaanaaattggggttgtgaacagtggntcattggggnatgggggtactgcccggttctnttttttntnaaaannaaattttngatggccaaannaaaanccnaaaatctgtttnnaaaaaananaaannnnntaaann

SEQ ID NO: 669 - DNA, 986 bp, Homo sapiens
  misc_feature (477)..(477): n is a, c, g, or t
  misc_feature (499)..(499): n is a, c, g, or t
  misc_feature (546)..(546): n is a, c, g, or t
  misc_feature (674)..(674): n is a, c, g, or t
  misc_feature (677)..(677): n is a, c, g, or t
  misc_feature (687)..(687): n is a, c, g, or t
  misc_feature (709)..(710): n is a, c, g, or t
  misc_feature (730)..(730): n is a, c, g, or t
  misc_feature (737)..(737): n is a, c, g, or t
  misc_feature (742)..(742): n is a, c, g, or t
  misc_feature (745)..(745): n is a, c, g, or t
  misc_feature (754)..(754): n is a, c, g, or t
  misc_feature (770)..(771): n is a, c, g, or t
  misc_feature (774)..(774): n is a, c, g, or t
  misc_feature (813)..(813): n is a, c, g, or t
  misc_feature (817)..(818): n is a, c, g, or t
  misc_feature (829)..(829): n is a, c, g, or t
  misc_feature (838)..(838): n is a, c, g, or t
  misc_feature (852)..(852): n is a, c, g, or t
  misc_feature (860)..(861): n is a, c, g, or t
  misc_feature (869)..(869): n is a, c, g, or t
  misc_feature (873)..(873): n is a, c, g, or t
  misc_feature (898)..(898): n is a, c, g, or t
  misc_feature (916)..(916): n is a, c, g, or t
  misc_feature (925)..(925): n is a, c, g, or t
  misc_feature (929)..(930): n is a, c, g, or t
  misc_feature (932)..(933): n is a, c, g, or t
  misc_feature (939)..(939): n is a, c, g, or t
  misc_feature (942)..(943): n is a, c, g, or t
  misc_feature (949)..(949): n is a, c, g, or t
  misc_feature (957)..(957): n is a, c, g, or t
  misc_feature (963)..(963): n is a, c, g, or t
  misc_feature (969)..(969): n is a, c, g, or t
  misc_feature (977)..(977): n is a, c, g, or t
  misc_feature (980)..(980): n is a, c, g, or t
  misc_feature (986)..(986): n is a, c, g, or t
gccgcccgcaccgagccgcgggacccgggccgtaccggggaggggccgctccgggccgcagcgcgagggcagcgaggggcggcggggacctggcaccgggcggggccggcggcagcgaccatgatcgctttgttcaacaagctgctggactggttcaaggccctattctggaaggaggagatggagctcacgctggtcgggcttcagtactcgggcaagaccaccttcgtcaacgtgatcgcgtcaggacagttcaacgaggacatgatccccaccgtgggtttcaacatgcgcaaaatcaccaaagggaatgtgactatcaagctctgggacattgggggacagccgcgtttccgcagcatgtgggagcgctactgccgaggagtgagcgccatcgtgtacatggtggatgctgctgaccaggagaagattgaggcctctaagaacgagctccacaacctactggacaaacctcanctgcagggcatcccggtcttantcctgggtaacaagcgagaccttccgggagcattggatgagaagganctgattgagaaaatgaatctgtctgccatccaggaccgagagatctgctgctactccatctcttgcaaagaaaaggacaacattgacatcaccctacagtggcttattcaacactcgaagtcacgganaanctgagactcnagccctttctccctcagaccanngaccgttcatcaatctaaancctgaanccganctncccgcccancccctgtcgtcccccnnaanccccacccctcttcacccaagtgtgagaagggccccttntggnnaaccccaaaantcctgtttntgcttaaggttttnaacttccnntttttttntttnaaaaaaaaatttgccccccattttnggttccccataatttccnacccttccncccnncnntttttnccnntcatcnaacccttnctcccntcccancaaccctnggnacaaan

SEQ ID NO: 670 - DNA, 1001 bp, Homo sapiens
  misc_feature (1)..(1): n is a, c, g, or t
  misc_feature (213)..(213): n is a, c, g, or t
  misc_feature (237)..(237): n is a, c, g, or t
  misc_feature (244)..(244): n is a, c, g, or t
  misc_feature (294)..(294): n is a, c, g, or t
  misc_feature (361)..(361): n is a, c, g, or t
  misc_feature (373)..(373): n is a, c, g, or t
  misc_feature (385)..(385): n is a, c, g, or t
  misc_feature (406)..(406): n is a, c, g, or t
  misc_feature (421)..(421): n is a, c, g, or t
  misc_feature (436)..(436): n is a, c, g, or t
  misc_feature (516)..(516): n is a, c, g, or t
  misc_feature (544)..(544): n is a, c, g, or t
  misc_feature (572)..(572): n is a, c, g, or t
  misc_feature (583)..(583): n is a, c, g, or t
  misc_feature (590)..(590): n is a, c, g, or t
  misc_feature (600)..(600): n is a, c, g, or t
  misc_feature (630)..(630): n is a, c, g, or t
  misc_feature (641)..(641): n is a, c, g, or t
  misc_feature (644)..(644): n is a, c, g, or t
  misc_feature (667)..(667): n is a, c, g, or t
  misc_feature (677)..(677): n is a, c, g, or t
  misc_feature (680)..(680): n is a, c, g, or t
  misc_feature (682)..(682): n is a, c, g, or t
  misc_feature (685)..(685): n is a, c, g, or t
  misc_feature (700)..(700): n is a, c, g, or t
  misc_feature (717)..(717): n is a, c, g, or t
  misc_feature (720)..(720): n is a, c, g, or t
  misc_feature (730)..(730): n is a, c, g, or t
  misc_feature (744)..(744): n is a, c, g, or t
  misc_feature (751)..(751): n is a, c, g, or t
  misc_feature (762)..(762): n is a, c, g, or t
  misc_feature (772)..(772): n is a, c, g, or t
  misc_feature (801)..(801): n is a, c, g, or t
  misc_feature (812)..(813): n is a, c, g, or t
  misc_feature (823)..(823): n is a, c, g, or t
  misc_feature (825)..(825): n is a, c, g, or t
  misc_feature (842)..(842): n is a, c, g, or t
  misc_feature (856)..(857): n is a, c, g, or t
  misc_feature (870)..(870): n is a, c, g, or t
  misc_feature (882)..(882): n is a, c, g, or t
  misc_feature (884)..(884): n is a, c, g, or t
  misc_feature (887)..(890): n is a, c, g, or t
  misc_feature (892)..(892): n is a, c, g, or t
  misc_feature (898)..(898): n is a, c, g, or t
  misc_feature (915)..(916): n is a, c, g, or t
  misc_feature (923)..(923): n is a, c, g, or t
  misc_feature (925)..(926): n is a, c, g, or t
  misc_feature (931)..(931): n is a, c, g, or t
  misc_feature (944)..(944): n is a, c, g, or t
  misc_feature (952)..(952): n is a, c, g, or t
  misc_feature (958)..(958): n is a, c, g, or t
  misc_feature (960)..(960): n is a, c, g, or t
  misc_feature (967)..(968): n is a, c, g, or t
  misc_feature (978)..(978): n is a, c, g, or t
  misc_feature (986)..(987): n is a, c, g, or t
  misc_feature (994)..(994): n is a, c, g, or t
ncggacgcgtgggcggaggcggaggagaggcctgcggcggcagggagcggcgggactgggagcgggcgccggagccgacccgagccgagccgagccgagccgagccggagcgggcggcgaaggccggcgcggcgagcatcaaccatgtcggtgttcgggaagctgttcggggctggagggggtaaggccggcaagggcggcccgaccccccangaggccatccagcggctgcggganacggaanagatgttaagcaagaaacaggagttcctggagaagaaaatcgagcagganctgacggccgccaagaagcacggcaccaaaaacaagcgcgcggccctccaggcactgaagcgtaatnaagaggtatganaagcagctggcncagatcgacggcacattatcnaccatcgagttccancgggaggccctgganaatgccaacaccaacaccgaggtgctcaagaacatgggctatgccgccaaggccatgaaggcggcccatgacaacatggncatcgataaagttgatgagttaatgcangacattgctgaccagcaaaaacttgcanaggatatttcnacagcantttcaaaacntgtagggtttaggagaacagttttgacgangattgagctcntgntggaattaaaaaaaacttaaaantggaggaacntananaanaattttgcttggaanttcagttggacccgaancanttccctctanccaaatgtttcccntctatancccttaccatnaaaaaccccnccaaaaataaaaaaaaaaagggcgggccncctccctatanngaattcgtantnaattttaatttaacctnacctttgaattccnnttttataaatccnataatttacttncnaannnncntcttgnttttttccaaaaatctnngtttctncnngatcntttttttttgggnaaaaaatncaagcntntcttggnnaaatttttcntagtttannaacttanattgaaa

SEQ ID NO: 671 - DNA, 844 bp, Homo sapiens
gaggacaggctgggggcggcgaccgcgaggggccgcgcgcggagggcgcctggtgcagcatgggcggcccgcgggcttgggcgctgctctgcctcgggctcctgctcccgggaggcggcgctgcgtggagcatcggggcagctccgttctccggacgcaggaactggtgctcctatgtggtgacccgcaccatctcatgccatgtgcagaatggcacctaccttcagcgagtgctgcagaactgcccctggcccatgagctgtccggggagcagctacagaactgtggtgagacccacatacaaggtgatgtacaagatagtgaccgcccgtgagtggaggtgctgccctgggcactcaggagtgagctgcgaggaagttgcagcttcctctgcctccttggagcccatgtggtcgggcagtaccatgcagcggatggcgcttcggcccacagccttctcaggttgtctcaactgcagcaaagtgtcagagctgacagagcggctgaaggtgctggaggccaagatgaccatgctgactgtcatagagcagccagtacctccaacaccagctacccctgaggaccctgccccgctctggggtccccctcctgcccagggcagccccggagatggaggcctccaggaccaagtcggtgcttggggggcttcccgggcccaccggccccaagggagatgccggcagtcggggcccaatggggatgagaggcccaccaggtccacagggccccccagggagccctggccgggctggagctgtgggcacccctggagagaggggacctcctgggccaccaggcctcctggccccctgggcccccagcc

SEQ ID NO: 672 - DNA, 1011 bp, Homo sapiens
  misc_feature (586)..(586): n is a, c, g, or t
  misc_feature (717)..(717): n is a, c, g, or t
  misc_feature (724)..(724): n is a, c, g, or t
  misc_feature (730)..(730): n is a, c, g, or t
  misc_feature (734)..(734): n is a, c, g, or t
  misc_feature (744)..(746): n is a, c, g, or t
  misc_feature (748)..(758): n is a, c, g, or t
  misc_feature (780)..(780): n is a, c, g, or t
  misc_feature (787)..(787): n is a, c, g, or t
  misc_feature (795)..(795): n is a, c, g, or t
  misc_feature (822)..(822): n is a, c, g, or t
  misc_feature (834)..(834): n is a, c, g, or t
  misc_feature (849)..(849): n is a, c, g, or t
  misc_feature (860)..(860): n is a, c, g, or t
  misc_feature (871)..(871): n is a, c, g, or t
  misc_feature (875)..(875): n is a, c, g, or t
  misc_feature (891)..(892): n is a, c, g, or t
  misc_feature (913)..(913): n is a, c, g, or t
  misc_feature (916)..(916): n is a, c, g, or t
  misc_feature (927)..(927): n is a, c, g, or t
  misc_feature (931)..(932): n is a, c, g, or t
  misc_feature (948)..(948): n is a, c, g, or t
  misc_feature (957)..(957): n is a, c, g, or t
  misc_feature (982)..(982): n is a, c, g, or t
  misc_feature (995)..(995): n is a, c, g, or t
  misc_feature (998)..(998): n is a, c, g, or t
  misc_feature (1011)..(1011): n is a, c, g, or t
ggagcagtgtccggccatggccggagcccgcaggctggagctaggcgaggccctggcgctggggtcgggctggcgtcatgcgtgccacgctctcctctacgcgccggaccctgggatgctcttcggccgcatcccgctgcgctacgccatactgatgcagatgcgcttcgatggacgcctgggcttccccggcggattcgtggacacgcaggacagaagcctagaggacgggctgaaccgcgagctgcgcgaggagctgggcgaagcggctgccgctttccgcgtggagcgcactgactaccgcagctcccacgtcgggtcagggccacgcgttgtggcccacttctatgccaagcgtctgacgctcgaggagctgttggctgtggaggccggcgcaacacgcgccaaggaccacgggctggaggtgctgggcctggtgcgagtgcccctgtataccctgcgggatggtgtaggaggcctgcctaccttcctggagaattcctttattggctctgcgcgggagcagttacttgaagctctccaggacttgggactgctgcagtctggctctatttcaggccttaanattccagctcatcactagaggcagccctccatggacccatgaaaactgagatgaggaccttggtactagggagggagggaaggacgtgggaatgttttcttattggatctgaaagatgatacatgataccngatgaanagaaanaaanaaaaaataannnannnnnnnnnnnggggcggccgcctccctataantgagtcntaattaanccttaattaacttgaacttggaactcntgtttgaaaaantccaagaaatgaacncaaaaactccnttctggatttntttnaaaaaccttccggttnnccccccgggcgtttttttttnggnaaaaatccaanttanntttggcaaaattttcnggaactaangaatttaaaattggaaaaaaaaatnccttggaataacnccnttttaaaattccn

SEQ ID NO: 673 - DNA, 1128 bp, Homo sapiens
  misc_feature (756)..(756): n is a, c, g, or t
  misc_feature (811)..(811): n is a, c, g, or t
  misc_feature (858)..(858): n is a, c, g, or t
  misc_feature (862)..(862): n is a, c, g, or t
  misc_feature (868)..(868): n is a, c, g, or t
  misc_feature (870)..(870): n is a, c, g, or t
  misc_feature (880)..(880): n is a, c, g, or t
  misc_feature (886)..(886): n is a, c, g, or t
  misc_feature (904)..(904): n is a, c, g, or t
  misc_feature (939)..(939): n is a, c, g, or t
  misc_feature (955)..(955): n is a, c, g, or t
  misc_feature (960)..(960): n is a, c, g, or t
  misc_feature (964)..(964): n is a, c, g, or t
  misc_feature (967)..(967): n is a, c, g, or t
  misc_feature (972)..(972): n is a, c, g, or t
  misc_feature (985)..(985): n is a, c, g, or t
  misc_feature (993)..(993): n is a, c, g, or t
  misc_feature (1003)..(1003): n is a, c, g, or t
  misc_feature (1027)..(1027): n is a, c, g, or t
  misc_feature (1034)..(1034): n is a, c, g, or t
  misc_feature (1036)..(1036): n is a, c, g, or t
  misc_feature (1038)..(1038): n is a, c, g, or t
  misc_feature (1045)..(1045): n is a, c, g, or t
  misc_feature (1065)..(1065): n is a, c, g, or t
  misc_feature (1068)..(1068): n is a, c, g, or t
  misc_feature (1076)..(1076): n is a, c, g, or t
  misc_feature (1079)..(1079): n is a, c, g, or t
  misc_feature (1083)..(1083): n is a, c, g, or t
  misc_feature (1085)..(1085): n is a, c, g, or t
  misc_feature (1088)..(1088): n is a, c, g, or t
  misc_feature (1093)..(1094): n is a, c, g, or t
  misc_feature (1101)..(1101): n is a, c, g, or t
  misc_feature (1110)..(1110): n is a, c, g, or t
  misc_feature (1113)..(1114): n is a, c, g, or t
  misc_feature (1118)..(1118): n is a, c, g, or t
  misc_feature (1124)..(1124): n is a, c, g, or t
ggccttctggtggtgggcacaactgtggtgggatacttgccaaatgggaggtttaaggagttcatgagtaaacatgttcacttaatgtgttaccggatctgcgtgcgagcgctgacagccatcatcacctaccatgacagggaaaacagaccaagaaatggtggcatctgtgtggccaatcatacctcaccgatcgatgtgatcatcttggccagcgatggctattatgccatggtgggtcaagtgcacgggggactcatgggtgtgattcagagagccatggtgaaggcctgcccacacgtctggtttgagcgctcggaagtgaaggatcgccacctggtggctaagagactgactgaacatgtgcaagataaaagcaagctgcctatcctcatcttcccagaaggaacctgcatcaataatacatcggtgatgatgttcaaaaagggaagttttgaaattggagccacagtttaccctgttgctatcaagtatgaccctcaatttggcgatgccttctggaacagcagcaaatacgggatggtgacgtacctgctgcgaatgatgaccagctgggccattgtctgcagcgtgtggtacctgcctcccatgactagagaggcagatgaagatgctgtccagtttgcgaatagggtgaaatctgccattgccaggcagggaggacttgtggacctgctgtgggatgggggcctgaagagggagaaggtgaaggacacgttcaaggaggagcagcanaagctgtacagcaagatgatcgtggggaaccacaaggacaggagccgctcctgancctgcctccagctggctggggcccccgtgcggggtgccaccgggctnaaanctggantngccgcccccncccccnctgctgtgtcctttccanactccagggctccccgggctgctctggatcccagnactccggctttccccnaaccncacnggnatccntgtgcacccgggncaacctanccttgggggnctaaacggatgctgctgggtgttnccacccnananaaaaagnccttgtttttttaaaaaaantcnttggaagnaangccntnaanggaannccccccntttcccccnttnncggnctaaangttt

SEQ ID NO: 674 - DNA, 735 bp, Homo sapiens
  misc_feature (613)..(613): n is a, c, g, or t
  misc_feature (666)..(666): n is a, c, g, or t
  misc_feature (685)..(685): n is a, c, g, or t
  misc_feature (687)..(687): n is a, c, g, or t
  misc_feature (698)..(698): n is a, c, g, or t
  misc_feature (704)..(704): n is a, c, g, or t
  misc_feature (708)..(709): n is a, c, g, or t
  misc_feature (711)..(711): n is a, c, g, or t
  misc_feature (715)..(715): n is a, c, g, or t
  misc_feature (721)..(721): n is a, c, g, or t
  misc_feature (726)..(726): n is a, c, g, or t
  misc_feature (731)..(731): n is a, c, g, or t
  misc_feature (733)..(733): n is a, c, g, or t
gggcgagccttccgccgcagctccgggctgagccagcatcgccgcacgcacagcggcgagaagccgtaccgctgccccgactgcgggaagtccttcagccacggtgccaccctggctcagcaccgtggcatccacactggggcgcggccgtaccagtgcgcggcctgcggcaaggccttcggctggcgctccacgctgctgaaacatcgcagcagccacagcggggagaagccgcaccactgcccggtgtgtggcaaggccttcgggcacggctcgctcctggcacagcacctgcgcacgcacggcggcccgcggccccacaagtgcccggtgtgcgccaagggcttcggccagggctctgcgctgctcaaacacctgcgcacgcacacgggcgagcggccctacccgtgtccgcagtgcggcaaggccttcgggcagagctcggcgctgctgcagcaccagcgcacacacacggccgagcgcccctaccgctgcccccactgcggcaaagccttcgggcagagctccaacttgcaacaccacctgcgcatccacacgggcgagcggccctacgcctgcccgcactgctccaaggccttcggccagagctcancgctgctccagcacctgcacgtgcattcgggcgagcgtccctatcgctgtcanctctgcgggaaggccttcngncaggcctccancctcancaannanaaangggtgnatganggtgnancc

SEQ ID NO: 675 - DNA, 984 bp, Homo sapiens
  misc_feature (893)..(893): n is a, c, g, or t
  misc_feature (901)..(901): n is a, c, g, or t
  misc_feature (904)..(904): n is a, c, g, or t
  misc_feature (906)..(906): n is a, c, g, or t
  misc_feature (912)..(912): n is a, c, g, or t
  misc_feature (917)..(917): n is a, c, g, or t
  misc_feature (924)..(924): n is a, c, g, or t
  misc_feature (934)..(934): n is a, c, g, or t
  misc_feature (951)..(951): n is a, c, g, or t
  misc_feature (957)..(957): n is a, c, g, or t
  misc_feature (959)..(959): n is a, c, g, or t
  misc_feature (969)..(984): n is a, c, g, or t
ggcggcgggggagcagcgagcgggcttcagcgagccgcaggaggcacaggcctgtcctgggtccccgcaggtctgcgcgtctgttgttcccagcgctctgagaggcctgaaaaggaagagcaacctgtccagaatccccgcaggaaaggaaaaggaggggaaatctcgacatggaaaaactcttcaatgaaaatgaaggaatgccttcgaatcaaggaaagatagacaatgaagaacagccaccgcacgagggaaagccagaagtagcttgtattctggaagacaagaagttagaaaacgagggaaacacagaaaacacgggcaagagagttgaggaaccgttaaaggataaagaaaagccagagagtgcgggaaaggcaaaaggtgaaggagagccagacagtgaaagagagccagagagtgagggagagccagaaagtgaaacaagggctgcaggaaagcgcccagctgaggatgatatacccaggaaagccaaaagaaaaaccaacaaggggctggctcagtacctcaagcaatataaggaagccatacatgatatgaatttcagcaatgaggacatgataagagaatttgacaacatggctagggtggaggataaaaggagaaaaagcaaacagaaattgggggcgtttttgtggatgcaaagaaatttacaggaccccttctatcctaggggtccaagggaattcaggggtggctgcagggccccacgaagggacactgaagacattccttatgtgtagtgtccctggcaggcatttgtcaggccatatgttttaaccttatggtaatactttgctttagtcgttcctcctgctaccagtagcgttttgacccacctgccagtgtttgcttgctctatgtttcagtancaaatttnccncntgtgcnttgcnaaaaacntcctgattcntggaaaaaataaagccncttttnantatcctcttnnnnnnnnnnnnnnnn

SEQ ID NO: 676 - DNA, 747 bp, Homo sapiens
  misc_feature (500)..(500): n is a, c, g, or t
  misc_feature (554)..(554): n is a, c, g, or t
  misc_feature (557)..(557): n is a, c, g, or t
  misc_feature (588)..(588): n is a, c, g, or t
  misc_feature (593)..(593): n is a, c, g, or t
  misc_feature (621)..(621): n is a, c, g, or t
  misc_feature (623)..(623): n is a, c, g, or t
  misc_feature (625)..(625): n is a, c, g, or t
  misc_feature (649)..(649): n is a, c, g, or t
  misc_feature (657)..(657): n is a, c, g, or t
  misc_feature (670)..(670): n is a, c, g, or t
  misc_feature (675)..(675): n is a, c, g, or t
  misc_feature (678)..(678): n is a, c, g, or t
  misc_feature (684)..(684): n is a, c, g, or t
  misc_feature (688)..(690): n is a, c, g, or t
  misc_feature (704)..(704): n is a, c, g, or t
  misc_feature (708)..(708): n is a, c, g, or t
  misc_feature (718)..(718): n is a, c, g, or t
  misc_feature (723)..(724): n is a, c, g, or t
  misc_feature (732)..(732): n is a, c, g, or t
  misc_feature (734)..(734): n is a, c, g, or t
  misc_feature (739)..(739): n is a, c, g, or t
  misc_feature (742)..(742): n is a, c, g, or t
  misc_feature (746)..(746): n is a, c, g, or t
gctctgttcacttgcagataccatacagagccttcattcattcattcattgacaatgaatgtggggtgcccctctgtaaccagacctggatcaagacgcctgcctccccagactcagccactgcccacttcagcttctgccggaccctcctggagcacacggtgtcagctgagagcatcccctgccacttgcctcggacacctggcaccagcctcacgtggcatgactcccgcagccagagggcggccagcagcaggccaatcaagctcctgcagcagcccggcacagacaccccccagggccggctgtactctgaccactatggcctgtaccatacaagcccctcgctgggtggcctgacccggcccgtggtcctgtggagtcagcaggacgtctgcaagtggctcaagaagcactgtccccacaactacctcgtctacgtggaggccttctcccagcatgccatcaccggccgggcactgctgcggctgaatgcgganaagctgcagcggatggggctggcccaggaggcccaaaggcaggaggtgctgcancangtgctccgcctgcaagtgcgtgaggaagggncgaancctgcaactgctcaccaaagcttccttncngnaaaaaagtcctaactgctgctgangcttgaanccaaaaccccaanactgngangggaantccnnnggcttaaggaaggnaagnccaaactggnccccnnaaactccntntttgnaancctng

SEQ ID NO: 677 - DNA, 731 bp, Homo sapiens
  misc_feature (672)..(672): n is a, c, g, or t
  misc_feature (701)..(701): n is a, c, g, or t
  misc_feature (720)..(720): n is a, c, g, or t
  misc_feature (730)..(730): n is a, c, g, or t
gcccacgcgtccgctggtgtcgccatgggccgccgccccgcccgttgttaccggtattgtaagaacaagccgtacccaaagtctcgcttctgccgaggtgtccctgatgccaagattcgcatttttgacctggggcggaaaaaggcaaaagtggatgagtttccgctttgtggccacatggtgtcagatgaatatgagcagctgtcctctgaagccctggaggctgcccgaatttgtgccaataagtacatggtaaaaagttgtggcaaagatggcttccatatccgggtgcggctccaccccttccacgtcatccgcatcaacaagatgttgtcctgtgctggggctgacaggctccaaacaggcatgcgaggtgcctttggaaagccccagggcactgtggccagggttcacattggccaagttatcatgtccatccgcaccaagctgcagaacaaggagcatgtgattgaggccctgcgcagggccaagttcaagtttcctggccgccagaagatccacatctcaaagaagtggggcttcaccaagttcaatgctgatgaatttgaagacatggtggctgaaaagcggctcatcccagatggctgtggggtcaagtacatccccagtcgtggccctctggacaagtggcgggccctgcactcatgaggnctttccaatgtgctgccccccctcttaanaactcaccaaaaaaattcnacttcctgtnc

SEQ ID NO: 678 - DNA, 1089 bp, Homo sapiens
  misc_feature (803)..(803): n is a, c, g, or t
  misc_feature (852)..(852): n is a, c, g, or t
  misc_feature (855)..(856): n is a, c, g, or t
  misc_feature (863)..(863): n is a, c, g, or t
  misc_feature (873)..(873): n is a, c, g, or t
  misc_feature (876)..(876): n is a, c, g, or t
  misc_feature (878)..(878): n is a, c, g, or t
  misc_feature (885)..(885): n is a, c, g, or t
  misc_feature (891)..(891): n is a, c, g, or t
  misc_feature (896)..(896): n is a, c, g, or t
  misc_feature (911)..(911): n is a, c, g, or t
  misc_feature (913)..(913): n is a, c, g, or t
  misc_feature (924)..(924): n is a, c, g, or t
  misc_feature (954)..(954): n is a, c, g, or t
  misc_feature (963)..(963): n is a, c, g, or t
  misc_feature (965)..(965): n is a, c, g, or t
  misc_feature (973)..(973): n is a, c, g, or t
  misc_feature (981)..(981): n is a, c, g, or t
  misc_feature (990)..(990): n is a, c, g, or t
  misc_feature (992)..(992): n is a, c, g, or t
  misc_feature (999)..(999): n is a, c, g, or t
  misc_feature (1005)..(1006): n is a, c, g, or t
  misc_feature (1011)..(1011): n is a, c, g, or t
  misc_feature (1018)..(1018): n is a, c, g, or t
  misc_feature (1029)..(1029): n is a, c, g, or t
  misc_feature (1040)..(1041): n is a, c, g, or t
  misc_feature (1043)..(1043): n is a, c, g, or t
  misc_feature (1047)..(1047): n is a, c, g, or t
  misc_feature (1054)..(1054): n is a, c, g, or t
  misc_feature (1058)..(1058): n is a, c, g, or t
  misc_feature (1063)..(1063): n is a, c, g, or t
  misc_feature (1066)..(1066): n is a, c, g, or t
  misc_feature (1085)..(1086): n is a, c, g, or t
  misc_feature (1089)..(1089): n is a, c, g, or t
gggcggacccgggagcgtgcgtccggcccagccgctgggaccccgcctccccaaagcgcaccgcccaaagaaaacccctcagagaggaagaccaacgagggcaagaggaaggcggccttggtccccaacgaggagcgacccatggggaccgggcccgaccccgacgggctggacgggaacgcggagctcacggagacctactgcgctgagaagtggcactccctctgcaacttctttgtcaatttctggaacggctgagactgcctgccggcttagggagggttgatgggggaggcgtggggaagggaaagctaagggcgtcttagaccggggggtactgtgatagagattggggagaagtccaggttctcgaatgggggtgggggcaagggtaagggtgagatgcttgggatgagagtgtaaggggtatggagaatctctgggatagcagagaagttaaaaattttgaaaagtctcagtcctgattaagagcaggaaaaataatggaaacagaaataggcgtactttaaatgtgcaaaaactggagactggggagagaaatcgatgcagagagaggctgagaataagggggagatagagtgactaaagtgatgtgagtcccatgtggggagggggatgcaatgtttattgtttaacatttctattaaatgcagccatgagcaattgccaacctgagccaggttgaatcaatgtcttctcacttaatcagctaacaagactgcagactttttttccgtttctgaattggtataaacttggatgcggcgtggtgggtgtcatanataacctctatagggacagaagcctcacaggtcaaaactggctccaagnaanntttgcanaatgatttcnttncnttctttnaaaaanctacntttttttttttttcntnaaagggtctgnttgcccagctggaatgcggtggctattccnaggggtaananaggactgnatttccantctggcctnanggatctncatttnnccccnaaaactngaataaaatantggaataaaanntncccncctcctnggtnaaagnccnttttttttttttaaaaggnnttn

SEQ ID NO: 679 - DNA, 1043 bp, Homo sapiens
  misc_feature (757)..(757): n is a, c, g, or t
  misc_feature (800)..(801): n is a, c, g, or t
  misc_feature (808)..(808): n is a, c, g, or t
  misc_feature (838)..(838): n is a, c, g, or t
  misc_feature (863)..(863): n is a, c, g, or t
  misc_feature (875)..(875): n is a, c, g, or t
  misc_feature (884)..(884): n is a, c, g, or t
  misc_feature (904)..(904): n is a, c, g, or t
  misc_feature (907)..(907): n is a, c, g, or t
  misc_feature (924)..(924): n is a, c, g, or t
  misc_feature (929)..(929): n is a, c, g, or t
  misc_feature (931)..(931): n is a, c, g, or t
  misc_feature (934)..(934): n is a, c, g, or t
  misc_feature (939)..(939): n is a, c, g, or t
  misc_feature (959)..(959): n is a, c, g, or t
  misc_feature (962)..(962): n is a, c, g, or t
  misc_feature (970)..(970): n is a, c, g, or t
  misc_feature (973)..(973): n is a, c, g, or t
  misc_feature (996)..(996): n is a, c, g, or t
  misc_feature (1008)..(1008): n is a, c, g, or t
  misc_feature (1013)..(1013): n is a, c, g, or t
  misc_feature (1015)..(1015): n is a, c, g, or t
  misc_feature (1026)..(1026): n is a, c, g, or t
ggagttgtggaaccaaagagagctgtctccagagaagattctcaaagaccaggtgcccacttaactgtgaaaaagatatttgttggtggcattaaagaagacactgaagaacatcacctaagagattattttgaacagtatggaaaaattgaagtgattgaaatcatgactgaccgaggcagtggcaagaaaaggggctttgcctttgtaacctttgacgaccatgactccgtggataagattgtcattcagaaataccatactgtgaatggccacaactgtgaagttagaaaagccctgtcaaagcaagagatggctagtgcttcatccagccaaagaggtcgaagtggttctggaaactttggtggtggtcgtggaggtggtttcggtgggaatgacaacttcggtcgtggaggaaacttcagtggtcgtggtggctttggtggcagccgtggtggtggtggatatggtggcagtggggatggctataatggatttggtaatgatggaagcaattttggaggtggtggaagctacaatgattttgggaattacaacaatcagtcttcaaattttggacccatgaagggaggaaattttggaggcagaagctctggcccctatggcggtggaggccaatactttgcaaaaccacgaaaccaaggtggctatggcggttccagcagcagcagtagctatggcagtggcagaagattttaattaggaaacaaagcttagcaggagaggagagccaganaagtgacagggaagctacaggttacaacagatttgtgaactcnnccaagcncagtggtggcagggcctagctgctacaaanaaaacatgttttaaacaaatactcntgtgtatgggcnaaaaactcnaggactgtatttgggactantgnataacaggttattttantttcngntcnggggnaagtgtaagcatcccacaanggntttaatgnaantttttttttgcccccctgctgtngattgctaatgnaacancngatcggacccngaaaaatgtcttttttt

SEQ ID NO: 680 - DNA, 1003 bp, Homo sapiens
  misc_feature (858)..(858): n is a, c, g, or t
  misc_feature (900)..(900): n is a, c, g, or t
  misc_feature (904)..(905): n is a, c, g, or t
  misc_feature (911)..(911): n is a, c, g, or t
  misc_feature (924)..(924): n is a, c, g, or t
  misc_feature (930)..(930): n is a, c, g, or t
  misc_feature (935)..(935): n is a, c, g, or t
  misc_feature (939)..(939): n is a, c, g, or t
  misc_feature (947)..(947): n is a, c, g, or t
  misc_feature (959)..(959): n is a, c, g, or t
  misc_feature (974)..(974): n is a, c, g, or t
  misc_feature (978)..(978): n is a, c, g, or t
  misc_feature (980)..(983): n is a, c, g, or t
  misc_feature (994)..(994): n is a, c, g, or t
  misc_feature (997)..(997): n is a, c, g, or t
  misc_feature (1001)..(1001): n is a, c, g, or t
ggcaggcacctcgagaagcaggccccgaccgctcgccgacgaagcctcgtccgggcctcctgggagcggggtgtcaggtaccgtggcgcctcctcgcgttggtcttgctggttctcggcccccgaagcggagcgacggagacacagctgtggaagcatctggatccgctgcccaggtccccgagcttcccggaacccgaggccgcaggacactgaaggctgccattcccgagtaggtcacgctggacgccaccctaagctgggcccagaggctcccgtccaggagggctgcagtcggcgcagacaccgcgcgtgtggagacgggagacccatcctcctcggccgttccgagagtaggcgcggccggtcagattcgatgcagagccgaatgcgagtagaaagaagacaaaataagccccagttcttcgattctgggctgaagtgagattttcttgaatggcagccattgttttgcctcttaggtaagtgagtgcagtaaagaccggtaaggcccacgcagaagaaacactgaggaaagaagacacttccaaagtaacaaatgggaggaagcagccaacgcccgaggacaacatggcaagaaggagcctttggattccggactgggatggaaagagagttgattgaatcccggaatttggaaaccccagatacggagggcggacggtacaaccggagctgtcaggtggatttccaaggctttgcattggctgtacctgaaacttatggtggcctaaactccccagtatccactcttccttatcttgaatcttgctctgtcacccaggctggagtgcaatggtgcattctcaagctcactgcaacctctgtgcaggttcangtggaaaatctgaatcttgatgatataattggaactcttcanccanncatatntaaaaaaactatnttcaanttttnattnaaaaggantctccctctatngcccatttggaatgnaaangnnnnatttcggttantgnaacntc

SEQ ID NO: 681 - DNA, 794 bp, Homo sapiens
  misc_feature (561)..(561): n is a, c, g, or t
  misc_feature (574)..(574): n is a, c, g, or t
  misc_feature (615)..(615): n is a, c, g, or t
  misc_feature (621)..(621): n is a, c, g, or t
  misc_feature (625)..(625): n is a, c, g, or t
  misc_feature (665)..(665): n is a, c, g, or t
  misc_feature (693)..(693): n is a, c, g, or t
  misc_feature (703)..(703): n is a, c, g, or t
  misc_feature (713)..(713): n is a, c, g, or t
  misc_feature (726)..(726): n is a, c, g, or t
  misc_feature (738)..(738): n is a, c, g, or t
  misc_feature (746)..(746): n is a, c, g, or t
  misc_feature (748)..(748): n is a, c, g, or t
  misc_feature (752)..(752): n is a, c, g, or t
  misc_feature (756)..(756): n is a, c, g, or t
  misc_feature (761)..(761): n is a, c, g, or t
  misc_feature (764)..(764): n is a, c, g, or t
  misc_feature (770)..(770): n is a, c, g, or t
  misc_feature (774)..(774): n is a, c, g, or t
  misc_feature (776)..(776): n is a, c, g, or t
  misc_feature (781)..(781): n is a, c, g, or t
  misc_feature (786)..(786): n is a, c, g, or t
  misc_feature (788)..(788): n is a, c, g, or t
gagaactgctccaccccgctggctctgcccactcgagacctcaatgccacctttgatctctctgaggagcctccctcaaagcccagtttccatgaatgcattggctgggacaaaataccccaggagctgagcaggctggaccagcccttcatccccagggcacctgtgcccctgttcaccatgaagggccccaagccaacatcttccctccctgggacctctgcctgcaagaagaagcgcgttgcgagttcctcagtctcccatggccgcagccgcatcgcccgcctccccagcagcactttgaagaggccagctgggccccttgtactcccaggtgactggcactagggacagggatagcctgggccatggaggccgatgaagacaagaaggaggaggggacggggagctgatacccaaaagaaaggagggcctagggtattgccaagcatctcagggatgctgctgatgagacaggtgggaggtgggctggaggacggggacagagcgtcactttccttcctcgctgcactccccgccacccatccaactggcctgcanagctgcccttgantcccctgtgccctagcaaccggaggaatggaaaggacctcntcaggntggngagagcactctcagcagggaacggcgtcaccaaggtgtcntgaccgccagaatgtcctgaccaccaangtgtcctaanctaaccggcncctctgctggaanaccccctcttgnaacctgtnanccancctngcacnaanaagctngaancntgtcnttccntnaccttg

SEQ ID NO: 682 - DNA, 1087 bp, Homo sapiens
  misc_feature (731)..(731): n is a, c, g, or t
  misc_feature (760)..(760): n is a, c, g, or t
  misc_feature (841)..(841): n is a, c, g, or t
  misc_feature (844)..(844): n is a, c, g, or t
  misc_feature (863)..(863): n is a, c, g, or t
  misc_feature (867)..(867): n is a, c, g, or t
  misc_feature (887)..(887): n is a, c, g, or t
  misc_feature (908)..(908): n is a, c, g, or t
  misc_feature (910)..(910): n is a, c, g, or t
  misc_feature (953)..(953): n is a, c, g, or t
  misc_feature (956)..(956): n is a, c, g, or t
  misc_feature (963)..(963): n is a, c, g, or t
  misc_feature (966)..(966): n is a, c, g, or t
  misc_feature (978)..(978): n is a, c, g, or t
  misc_feature (986)..(986): n is a, c, g, or t
  misc_feature (1004)..(1004): n is a, c, g, or t
  misc_feature (1006)..(1006): n is a, c, g, or t
  misc_feature (1011)..(1011): n is a, c, g, or t
  misc_feature (1015)..(1015): n is a, c, g, or t
  misc_feature (1023)..(1023): n is a, c, g, or t
  misc_feature (1026)..(1026): n is a, c, g, or t
  misc_feature (1036)..(1036): n is a, c, g, or t
  misc_feature (1041)..(1041): n is a, c, g, or t
  misc_feature (1045)..(1045): n is a, c, g, or t
  misc_feature (1056)..(1056): n is a, c, g, or t
  misc_feature (1058)..(1059): n is a, c, g, or t
  misc_feature (1067)..(1067): n is a, c, g, or t
  misc_feature (1069)..(1070): n is a, c, g, or t
  misc_feature (1077)..(1077): n is a, c, g, or t
  misc_feature (1082)..(1082): n is a, c, g, or t
  misc_feature (1084)..(1084): n is a, c, g, or t
  misc_feature (1087)..(1087): n is a, c, g, or t
gcccacgcgtccgggctagatatggcgtcctctttgcttgcgggcgagcgattggtgcgtgctttgggccccggcggggagctggagccagagcggctaccccgaaagctgcgggccgagcttgaggccgcgctggggaagaagcacaagggcggtgatagctccagtggcccccaacgcttggtttctttccgtctcatccgggatctgcaccagcatctgagagaaagggattccaaactatacctccatgagctcctagaaggcagtgaaatctatctcccagaggttgtgaagcctccacggaacccagaactagttgcccggctggagaagattaagatacagctggccaatgaggaatataaacggatcacccgcaacgtcacttgtcaggatacaagacatggtgggactctcagcgacctgggaaagcaagtgagatcattgaaggctctggtcatcaccatcttcaatttcattgtcacggtggttgctgccttcgtctgcacttaccttggaagccaatatatcttcacagaaatggcctcgcgggtgctagctgcattgatcgtcgcctctgtggtgggtctggccgagctgtatgtcatggtgcgggcaatggaaggcgagctgggagaactgtaactggtgcttcatcatcaagtctagagaagactttgggggcttcaggctccaattggcagtcaccgactcagtcaacccatcanactttttgtattcagctccagttagtcanaagaccagcccaggccagctgctgtttctgtggggagccctaatcttctgtgaatttccaaagggagcattggaggaaatnganatacccatctttaaaacanaaanaactggtcttggtctatcantacctcttcctgaaatctggnanccatctgccttctccagttcattctaaaaactgctggaactanggnttttccntcnggaacaaatggnaatccagnccttcccaaaaataaacnanactgncctngaacttgnccntatgtaaaantgatncccnactttttccanannttttttangnnaacctgnaattnanttn

SEQ ID NO: 683 - DNA, 714 bp, Homo sapiens
  misc_feature (274)..(274): n is a, c, g, or t
  misc_feature (388)..(388): n is a, c, g, or t
  misc_feature (416)..(416): n is a, c, g, or t
  misc_feature (420)..(420): n is a, c, g, or t
  misc_feature (433)..(433): n is a, c, g, or t
  misc_feature (440)..(440): n is a, c, g, or t
  misc_feature (452)..(452): n is a, c, g, or t
  misc_feature (464)..(464): n is a, c, g, or t
  misc_feature (487)..(487): n is a, c, g, or t
  misc_feature (490)..(490): n is a, c, g, or t
  misc_feature (496)..(496): n is a, c, g, or t
  misc_feature (498)..(499): n is a, c, g, or t
  misc_feature (524)..(524): n is a, c, g, or t
  misc_feature (553)..(553): n is a, c, g, or t
  misc_feature (571)..(571): n is a, c, g, or t
  misc_feature (577)..(577): n is a, c, g, or t
  misc_feature (584)..(584): n is a, c, g, or t
  misc_feature (589)..(589): n is a, c, g, or t
  misc_feature (593)..(593): n is a, c, g, or t
  misc_feature (602)..(602): n is a, c, g, or t
  misc_feature (615)..(615): n is a, c, g, or t
  misc_feature (635)..(635): n is a, c, g, or t
  misc_feature (649)..(649): n is a, c, g, or t
  misc_feature (652)..(652): n is a, c, g, or t
  misc_feature (661)..(661): n is a, c, g, or t
  misc_feature (663)..(663): n is a, c, g, or t
  misc_feature (665)..(665): n is a, c, g, or t
  misc_feature (670)..(670): n is a, c, g, or t
  misc_feature (673)..(673): n is a, c, g, or t
  misc_feature (683)..(683): n is a, c, g, or t
  misc_feature (692)..(692): n is a, c, g, or t
  misc_feature (701)..(701): n is a, c, g, or t
  misc_feature (704)..(705): n is a, c, g, or t
  misc_feature (710)..(710): n is a, c, g, or t
  misc_feature (712)..(712): n is a, c, g, or t
gggcgcgctgtccccggtgctgatgctcagcgctgccccggagcctccgccgcgcccgcctcccgccctctccccaccgggctcgggcccaggctcgggctcccgccatggctcggctcgtcccggtcctaccccagagccgtcggggagcctgggcgcggcgctcgacagcagcctgcgtgccgccgtggcgttcaaggcagagggccagcgctgctatcgagagaagaagttccgggaggccatcggcaagtaccaccgagcgctgctgcanctgaaggcggcgcagggggcccgccctagcggcctgcccgcccccgcccccgggcccaccagcagccccgggccggcgcgcctcatcgaggagcagcggcgcctggtggagagnacggaggtggagtgttacgactccctcncggnttgcctgctgcantcggagntggtaaactacnaacgcgtgcgcnagtactgtctcaaggtactgganaancaacangnnaacttcaaagccacctaccgtgccngcattgccttctaccacctgggcgactanacacgcgcgctgcgctanctgaangaggccngcaancggnaacccacanacaccaaatgtgntccgctacatccagcttgantcaatctgaatatnaancgttgcaancntncaacntgnaacaacaatnggggctggnttcccagantcnnggatntnaa

SEQ ID NO: 684 - DNA, 1047 bp, Homo sapiens
  misc_feature (627)..(627): n is a, c, g, or t
  misc_feature (725)..(725): n is a, c, g, or t
  misc_feature (746)..(746): n is a, c, g, or t
  misc_feature (779)..(779): n is a, c, g, or t
  misc_feature (781)..(781): n is a, c, g, or t
  misc_feature (793)..(793): n is a, c, g, or t
  misc_feature (796)..(796): n is a, c, g, or t
  misc_feature (798)..(798): n is a, c, g, or t
  misc_feature (823)..(823): n is a, c, g, or t
  misc_feature (829)..(829): n is a, c, g, or t
  misc_feature (831)..(831): n is a, c, g, or t
  misc_feature (853)..(853): n is a, c, g, or t
  misc_feature (860)..(860): n is a, c, g, or t
  misc_feature (864)..(864): n is a, c, g, or t
  misc_feature (878)..(878): n is a, c, g, or t
  misc_feature (883)..(883): n is a, c, g, or t
  misc_feature (889)..(889): n is a, c, g, or t
  misc_feature (892)..(893): n is a, c, g, or t
  misc_feature (899)..(899): n is a, c, g, or t
  misc_feature (906)..(906): n is a, c, g, or t
  misc_feature (915)..(915): n is a, c, g, or t
  misc_feature (917)..(917): n is a, c, g, or t
  misc_feature (920)..(920): n is a, c, g, or t
  misc_feature (925)..(925): n is a, c, g, or t
  misc_feature (943)..(943): n is a, c, g, or t
  misc_feature (946)..(948): n is a, c, g, or t
  misc_feature (953)..(953): n is a, c, g, or t
  misc_feature (962)..(962): n is a, c, g, or t
  misc_feature (971)..(971): n is a, c, g, or t
  misc_feature (978)..(978): n is a, c, g, or t
  misc_feature (993)..(993): n is a, c, g, or t
  misc_feature (995)..(995): n is a, c, g, or t
  misc_feature (998)..(998): n is a, c, g, or t
  misc_feature (1023)..(1025): n is a, c, g, or t
  misc_feature (1034)..(1034): n is a, c, g, or t
  misc_feature (1037)..(1037): n is a, c, g, or t
  misc_feature (1043)..(1043): n is a, c, g, or t
gcccacgcgtccggagagcgcctgcctgtgcgccccgagcggggctgggactcttccaagatgcccacgttcgcacagagaccccggatcgcggaagctcgcgtctcgaaaggcctgcggtctcacgccctgcccgtcctgggttcacggtttttcatcacctgcggctgtcctgcgatcgaccacagctgtgcaggaggggcaggaggtatctgttgctgcagttaccggaacctttgccaggactagtacaggaccacgggctggtagctcagggatgtctcgtctgtgagttacagctgcacgctctccaggaaagaaggaatttcctcttctctggaaaccccaccacacagctggtttctcattggtgctgcttgcccattccctgagctgtgactgccagaggagtgggaggttggtggtgcctccagcccatcaggggcaggccctgggaccgcctgggaacaggaggactatggcacaaaccgagtgagtgatgggagcaacccgcagggctctgccacatccctgtcttccttcactgacatgaaacgcagaaaaggcagctttgccacaacacaggagcacgcaccgaatgtggccgcccagggctctgtccttgancctgttgtccaggactgtttaccaagggctgacaggcactgagtgccccgtgcacctggccagacactgcactcatgcagcggaaaagacagtgaacnaaactttgtccctggcctccnaaggcttaaggcgtaatggctgtcatgaagcanantgacaaagggcnagnangggggacctcttaaggggccatgcnattgangnaaaccaaaaagaatgaaagccntgcaatnaagnatgaaatggtccgnccttnaaaccnatnnctaaanaaatggntccagaaancnttnaattntttttccccaaagtttgnaannnaagtnggggaaatnttaaaaaanggggccngaaaaaaaatccccnanaanttgttgggaaaaagggggaaagggnnngtttccccnaangaattnaaac

SEQ ID NO: 685 - DNA, 872 bp, Homo sapiens
  misc_feature (615)..(615): n is a, c, g, or t
  misc_feature (663)..(681): n is a, c, g, or t
  misc_feature (723)..(723): n is a, c, g, or t
  misc_feature (728)..(728): n is a, c, g, or t
  misc_feature (768)..(768): n is a, c, g, or t
  misc_feature (826)..(826): n is a, c, g, or t
  misc_feature (831)..(831): n is a, c, g, or t
  misc_feature (840)..(841): n is a, c, g, or t
  misc_feature (843)..(843): n is a, c, g, or t
  misc_feature (852)..(852): n is a, c, g, or t
  misc_feature (854)..(854): n is a, c, g, or t
gaagaaggccatggagcaggagctgcaggcatctgtggggccttcttgtgtctctcccaaccacaggcagcggcccttggggtcctccacacagggcctcagacccccgcttcccctctgcggggttgcacctctccagtgctgcctgcctgcacctcctctggagccctaccttcgacctcgaggccagtcggctacccaccgctggggacggcagcttcagtgcagccccagggaagggccagcttccacacccatgtccagtgcagcaccccaagccccagcctgaagggctggtcaccgagtaggctctggcttctgccacagcgcacctgtctgccgctgccgcctcagctgctttggcccagccagcttcagatctggtcttggcgagctctcgccaggaccccaaggctgttggtctgtctggcccttgccccacccccttgccagatccctggtgtctggagctgagtggccgggcatcggtcccaagcatcaaagcctttggcctttctcctcccaggcctccacaaaggcctggcagacagaggtctcattccagcctgactcttgtcccctgggggacccagacaaagcacagcagccgctcanagacaggaatagaaatttcattaaaatctatggactttaaaaaaaaannnnnnnnnnnnnnnnnnngggcggccgctccctatagtgagtcgtattaagcttaattanctgancttggactcctgttgataaatccagtaatgacctcaaaantccatctggatttgttcaaaacgctcggttgccgccgggcgttttttattggtgaaanccaanctacttggnnanattttcagnanctaaggaaactaaaatgg

SEQ ID NO: 686 - DNA, 967 bp, Homo sapiens
  misc_feature (517)..(517): n is a, c, g, or t
  misc_feature (604)..(604): n is a, c, g, or t
  misc_feature (643)..(643): n is a, c, g, or t
  misc_feature (650)..(650): n is a, c, g, or t
  misc_feature (673)..(673): n is a, c, g, or t
  misc_feature (700)..(700): n is a, c, g, or t
  misc_feature (723)..(723): n is a, c, g, or t
  misc_feature (739)..(739): n is a, c, g, or t
  misc_feature (757)..(757): n is a, c, g, or t
  misc_feature (775)..(775): n is a, c, g, or t
  misc_feature (784)..(784): n is a, c, g, or t
  misc_feature (789)..(789): n is a, c, g, or t
  misc_feature (800)..(800): n is a, c, g, or t
  misc_feature (830)..(830): n is a, c, g, or t
  misc_feature (857)..(857): n is a, c, g, or t
  misc_feature (859)..(859): n is a, c, g, or t
  misc_feature (867)..(868): n is a, c, g, or t
  misc_feature (872)..(874): n is a, c, g, or t
  misc_feature (876)..(876): n is a, c, g, or t
  misc_feature (878)..(878): n is a, c, g, or t
  misc_feature (913)..(916): n is a, c, g, or t
  misc_feature (918)..(918): n is a, c, g, or t
  misc_feature (925)..(925): n is a, c, g, or t
  misc_feature (932)..(932): n is a, c, g, or t
  misc_feature (944)..(944): n is a, c, g, or t
  misc_feature (947)..(947): n is a, c, g, or t
  misc_feature (950)..(950): n is a, c, g, or t
  misc_feature (953)..(953): n is a, c, g, or t
ggtaggaagaaggcactgaccgactacaagaagctgcgggccttctttgtggaggaggaggagcatttcctgcaggaggctgagaaggaggaggggctccctgaggacgagctggctgaccccactgagcggttcaggtcactgctgcaggcggtctcggagctggagaagaagcatcgcaacctgggcctcagcatgctgctgcagtgatggcgccaacccgtggcagtcccagagctggaggcaggaggatggatcctcatctccatgggaagtgtcagcgtgtggctgccagggaagcgtggcaggcgcctggccttgggtccatctacatagttgcgtgtttcaacaatgtccatttatccttcaccctgaggcgtgttttgggggctgcaaacacctcccggtagaggctggacctgaggacccttcccacctgtgcccgtcccttcctgaagtcctagccacagcccatcctccatgagtcccggcagctctgggtcatgcccttccctgntcacccatctgcccctcacctcgtcatccagggacccagaccctgcaccttccatgtgggcccacagatccttggcaggtacctgangtgcaccattgagtgtcggatttgggggttagcatccanaaagaanaatgcgcatgacgctctgtgaangctggaactcaggtcttcagggaaaanaaaggaaaaactggattgcaccnttgatgccctcctgangaaggcggcccccccttnttgaaggtgggcgtgggncccggcccnaaccntattcaagtcncttctgtccacccttccccctttcctgggncccccaacccaattcctgttgcctccnangaaacccnncctnnngntnccacctggcctccccaaaaaagaaacccccttttnnnntnttttccntgggggnaaggggcttggnaanggnggnttaacccccatttt

SEQ ID NO: 687 - DNA, 1185 bp, Homo sapiens
  misc_feature (842)..(842): n is a, c, g, or t
  misc_feature (850)..(850): n is a, c, g, or t
  misc_feature (875)..(875): n is a, c, g, or t
  misc_feature (888)..(888): n is a, c, g, or t
  misc_feature (906)..(906): n is a, c, g, or t
  misc_feature (916)..(916): n is a, c, g, or t
  misc_feature (922)..(922): n is a, c, g, or t
  misc_feature (934)..(934): n is a, c, g, or t
  misc_feature (942)..(942): n is a, c, g, or t
  misc_feature (958)..(958): n is a, c, g, or t
  misc_feature (966)..(966): n is a, c, g, or t
  misc_feature (971)..(971): n is a, c, g, or t
  misc_feature (987)..(987): n is a, c, g, or t
  misc_feature (990)..(990): n is a, c, g, or t
  misc_feature (999)..(999): n is a, c, g, or t
  misc_feature (1005)..(1005): n is a, c, g, or t
  misc_feature (1008)..(1008): n is a, c, g, or t
  misc_feature (1028)..(1028): n is a, c, g, or t
  misc_feature (1048)..(1048): n is a, c, g, or t
  misc_feature (1053)..(1053): n is a, c, g, or t
  misc_feature (1056)..(1056): n is a, c, g, or t
  misc_feature (1062)..(1062): n is a, c, g, or t
  misc_feature (1066)..(1066): n is a, c, g, or t
  misc_feature (1081)..(1081): n is a, c, g, or t
  misc_feature (1083)..(1083): n is a, c, g, or t
  misc_feature (1102)..(1102): n is a, c, g, or t
  misc_feature (1120)..(1120): n is a, c, g, or t
  misc_feature (1122)..(1122): n is a, c, g, or t
  misc_feature (1129)..(1129): n is a, c, g, or t
  misc_feature (1134)..(1134): n is a, c, g, or t
  misc_feature (1136)..(1136): n is a, c, g, or t
  misc_feature (1142)..(1142): n is a, c, g, or t
  misc_feature (1149)..(1149): n is a, c, g, or t
  misc_feature (1155)..(1155): n is a, c, g, or t
  misc_feature (1167)..(1167): n is a, c, g, or t
  misc_feature (1176)..(1177): n is a, c, g, or t
  misc_feature (1179)..(1179): n is a, c, g, or t
  misc_feature (1183)..(1184): n is a, c, g, or t
ggccatgaatcggggcatgacagaaggagtaacgctgttaatcctggcagtgcagactgggctgatagaactgcaggttgttcatcgggcattcttgctcagtattatccttttcattgtcgtagcttctatcctacagtctatgttagaaattgcagatcctattgttttggcactgggagcatctagagacaagagcttgtggaaacacttccgtgctgtaagcctttgtttatttttattggtattccctgcttatatggcttatatgatttgccagtttttccacatggatttttggcttcttatcattatttccagcagcattcttacctctcttcaggttctgggaacactttttatttatgtcttatttatggttgaggaattcagaaaagagccagtggaaaacatggatgatgtcatctactatgtgaatggcacttaccgcctgctggagtttcttgtggccctctgtgtggtggcctatggcgtctcagagaccatctttggagaatggacagtgatgggctcaatgatcatcttcattcattcctactataacgtgtggcttcgggcccagctggggtggaagagctttcttctccgcagggatgctgtgaataagattaaatcgttacccattgctacgaaagagcagcttgagaaacacaatgatatttgtgccatctgttatcaggacatgaaatctgctgtgatcacgccttgcagtcattttttccatgcaggctgtcttaagaaatggctgtatgtccaggaaaacctgcccctctgtgccactggccatctgaaaaaactcctcccagcttccaggaataagnaactgaanccagttctacagccctcatgctggnacctgaaccaaancgtcatggttccaggaanggtactgaancccccnggcccaggaacnatactccnggggaccaggaaaacngggaaggntcccngggacaaaaaatggantancttggcccnaaccanccnaaaaaacccggaaaggggcnttttggacccccaaaaaaantcccnccnaggggnaaanaaaaaaacccatccngnggaaaaccccccctaaagnaaaaaccccccggaaagnanccttttnaaacncncggggngaaaaanttaccnccaaaagggaantccggtttnnantttnng

SEQ ID NO: 688 - DNA, 553 bp, Homo sapiens
gcggcaagtaacatgactaaaaagaagcgggagaatctgggcgtcgctctagagatcgatgggctagaggagaagctgtcccagtgtcggagagacctggaggccgtgaactccagactccacagccgggagctgagcccagaggccaggaggtccctggagaaggagaaaaacagcctaatgaacaaagcctccaactacgagaaggaactgaagtttcttcggcaagagaaccggaagaacatgctgctctctgtggccatctttatcctcctgacgctcgtctatgcctactggaccatgtgagcctggcacttccccacaaccagcacaggcttccacttggccccttggtcaggatcaagcaggcacttcaagcctcaataggaccaaggtgctggggtgttcccctcccaacctagtgttcaagcatggcttcctggcggcccaggccttgcctccctggcctgctggggggttccgggtctccagaaggacatggtgctggtccctcccttagcccaagggagaggcaataaagaacacaaagctg

SEQ ID NO: 689 - DNA, 730 bp, Homo sapiens
  misc_feature (14)..(14): n is a, c, g, or t
  misc_feature (265)..(265): n is a, c, g, or t
  misc_feature (351)..(352): n is a, c, g, or t
  misc_feature (397)..(397): n is a, c, g, or t
  misc_feature (433)..(433): n is a, c, g, or t
  misc_feature (461)..(461): n is a, c, g, or t
  misc_feature (468)..(469): n is a, c, g, or t
  misc_feature (474)..(474): n is a, c, g, or t
  misc_feature (487)..(487): n is a, c, g, or t
  misc_feature (510)..(510): n is a, c, g, or t
  misc_feature (514)..(514): n is a, c, g, or t
  misc_feature (528)..(528): n is a, c, g, or t
  misc_feature (532)..(532): n is a, c, g, or t
  misc_feature (552)..(552): n is a, c, g, or t
  misc_feature (555)..(555): n is a, c, g, or t
  misc_feature (560)..(560): n is a, c, g, or t
  misc_feature (564)..(564): n is a, c, g, or t
  misc_feature (573)..(573): n is a, c, g, or t
  misc_feature (578)..(578): n is a, c, g, or t
  misc_feature (583)..(583): n is a, c, g, or t
  misc_feature (590)..(590): n is a, c, g, or t
  misc_feature (594)..(594): n is a, c, g, or t
  misc_feature (607)..(607): n is a, c, g, or t
  misc_feature (609)..(609): n is a, c, g, or t
  misc_feature (616)..(616): n is a, c, g, or t
  misc_feature (630)..(630): n is a, c, g, or t
  misc_feature (645)..(648): n is a, c, g, or t
  misc_feature (652)..(652): n is a, c, g, or t
  misc_feature (667)..(667): n is a, c, g, or t
  misc_feature (678)..(678): n is a, c, g, or t
  misc_feature (682)..(682): n is a, c, g, or t
  misc_feature (711)..(711): n is a, c, g, or t
  misc_feature (718)..(719): n is a, c, g, or t
  misc_feature (725)..(726): n is a, c, g, or t
  misc_feature (728)..(728): n is a, c, g, or t
gcccacgcgtccgnccgcttctggtgcccagagtgcggcaaaggtttcaggcgccgggcgcacctgcggcagcacggggtgacccactcgggagcgcgccccttccagtgcgtgcgctgccagcgggagttcaagcgcctggccgacctggcgcgccacgcacaggtgcacgcggggggcccagccccgcacccgtgcccccgctgcccgcgccgcttctcgcgcgcctacagcctcctgcgccaccagcgctgccaccgcgcanagctggagagggccgccgcgctgcaggcactgcaggcccaggccccgacgtcgccgccaccgcccccgccgcccctgaaggccgannaggaggaagaagggctcccgctgcccctcgcaaacattaaggaanagccgccctctccggggaccccaccccagtccccgncggctccccctgtcttcctcagcgcctnctgtttnnacagncaagaccactcanccttcgagatggatgaggaagangtanacagtaaagctcanctgntcgggttggggggcctggcntcntgaanttcnccgccctgntctcngccgntccgacntganctccccggtttgnanaatgtangagggaatttgaangagccacctcctctnnnntacncaacctttccccttnatacccttganaatnaatgaatggggggtccttggaatagcctnttcctcnncaattnngntc

SEQ ID NO: 690 - DNA, 1166 bp, Homo sapiens
  misc_feature (844)..(844): n is a, c, g, or t
  misc_feature (877)..(877): n is a, c, g, or t
  misc_feature (885)..(885): n is a, c, g, or t
  misc_feature (908)..(908): n is a, c, g, or t
  misc_feature (927)..(927): n is a, c, g, or t
  misc_feature (932)..(932): n is a, c, g, or t
  misc_feature (947)..(947): n is a, c, g, or t
  misc_feature (951)..(951): n is a, c, g, or t
  misc_feature (967)..(967): n is a, c, g, or t
  misc_feature (976)..(976): n is a, c, g, or t
  misc_feature (986)..(987): n is a, c, g, or t
  misc_feature (995)..(995): n is a, c, g, or t
  misc_feature (1035)..(1035): n is a, c, g, or t
  misc_feature (1042)..(1042): n is a, c, g, or t
  misc_feature (1066)..(1066): n is a, c, g, or t
  misc_feature (1070)..(1070): n is a, c, g, or t
  misc_feature (1074)..(1074): n is a, c, g, or t
  misc_feature (1081)..(1081): n is a, c, g, or t
  misc_feature (1084)..(1084): n is a, c, g, or t
  misc_feature (1097)..(1097): n is a, c, g, or t
  misc_feature (1113)..(1113): n is a, c, g, or t
  misc_feature (1119)..(1119): n is a, c, g, or t
  misc_feature (1123)..(1123): n is a, c, g, or t
  misc_feature (1125)..(1125): n is a, c, g, or t
  misc_feature (1127)..(1127): n is a, c, g, or t
  misc_feature (1130)..(1130): n is a, c, g, or t
  misc_feature (1141)..(1141): n is a, c, g, or t
  misc_feature (1149)..(1149): n is a, c, g, or t
  misc_feature (1155)..(1155): n is a, c, g, or t
  misc_feature (1158)..(1158): n is a, c, g, or t
  misc_feature (1162)..(1163): n is a, c, g, or t
  misc_feature (1165)..(1165): n is a, c, g, or t
gctggagagaaaccctatgagtgtaagcaatgtgggaaagccttcacatctgcctcacaccttcaaatgcatgaaaggactcacactggaaagcaactgtatgaatctaaacaatgtgaaaaaacctttggatctgtcagaaaccttcaaattcatgaaaagacacaccctggagagaaaccctataaggaatatggaaaagcattcaacaatttctcttcctttcaaatacatgcaacaatgcacagaggacagaatgcctatgaatgtaaagagtgtgacaaagcattcatatctgccaagatccttcgagtacatgcaagaacacaccctggagagaaaccctatgaatgtaaggaatgcggaaaagcgttcaattatttttcttctttgcgtatacacaaaaggatgcacactggagagaaaccatatgaatgtaaggattgtgggaaagcattcagtttgcctggttcctttcgtagacataaaagggctcacactggagtgaaaccgtatgaatgcaaggaatgtggcaaagccttcacttcttctggttcctttcagtgtcataaaaggattcacactggagagaaaccctatgagtgtaagcagtgtggtaaagccttcatttcttccactgccattcgtagacatgaaaggactcacactggagagaaaccctatgagtgtaagcaatgtggaaaagcctttatttctttcagttccattcagtaccatgaaaggactcacactggagagaaacagtatgagtgtaagcagtgtggtaaagccttcatgtcttctactgcatttcagtatcatgaaaagacccacaccggagagnaacactatgaatgtaagcagtgtgggaaagccntcatttcntccagtagccttcgatatcatgnaaaggactcccactggganaaaanccctatgaatgtaancagngtggtaaagccttccnaatctgccnctccacttcnnatgcatanaagattcccctggggaaaaaccctatgaatgtaaccatgngggaaancctacaaattgtcccccaacttcngggnctgnaaggacnccnctggaaacacccnttgaataaaaccaaangggaancctncnanttnctaaaaccctncaatccgncagggnggnaacnntna

SEQ ID NO: 691 - DNA, 1077 bp, Homo sapiens
  misc_feature (877)..(877): n is a, c, g, or t
  misc_feature (884)..(884): n is a, c, g, or t
  misc_feature (896)..(896): n is a, c, g, or t
  misc_feature (915)..(915): n is a, c, g, or t
  misc_feature (931)..(935): n is a, c, g, or t
  misc_feature (937)..(937): n is a, c, g, or t
  misc_feature (953)..(953): n is a, c, g, or t
  misc_feature (973)..(973): n is a, c, g, or t
  misc_feature (982)..(982): n is a, c, g, or t
  misc_feature (984)..(984): n is a, c, g, or t
  misc_feature (989)..(989): n is a, c, g, or t
  misc_feature (992)..(992): n is a, c, g, or t
  misc_feature (1018)..(1018): n is a, c, g, or t
  misc_feature (1026)..(1026): n is a, c, g, or t
  misc_feature (1032)..(1032): n is a, c, g, or t
  misc_feature (1034)..(1034): n is a, c, g, or t
  misc_feature (1040)..(1040): n is a, c, g, or t
  misc_feature (1042)..(1042): n is a, c, g, or t
  misc_feature (1048)..(1048): n is a, c, g, or t
  misc_feature (1055)..(1055): n is a, c, g, or t
  misc_feature (1075)..(1075): n is a, c, g, or t
gacaacgtgggactctgcatttgtctgtttgatatcaccaaactggaggatgcctatgtattccctggggatggcgcatcacacaccaaagtccattttcgctgcgtggtgtttcatccattcctagatgagattctcattgggaagatcaaaggctgcagcccagaaggagtgcacggtaacagtggccctgacgcctcagacaagacttgggaacactgtgggggcaggagtctctctaggcttcttcgatgacattctcatccccccagagtcactgcagcagccagccaagttcgacgaagcggagcaggtgtgggtgtgggagtacgagacggaggaaggagcacacgacctctacatggacaccggcgaggagatccgcttccgggtggtggacgagagctttgttgacacgtcccccacagggcccagctcagcagatgccaccacttccagtgaggagctgccaaagaaggaggctccgtacacgcttgtgggatccatcagtgagccaggcctgggccttctctcctggtggaccagcaactagccctggggctggacagtggaccctaccagcctgcgggaaggtggtatggccggctgtgaagacaacagcagctgaggccgatgctaaggagatagtgtctcgagctggacagtgaggcaaggccaggagtgcccaccagcttgccccgctcctccaccatctaggccctgctcctccttcactgcagtgatggatccatctgtggctgtggctgttgggcctccactgaccttgactgaaaagacccttcctggacctggacttgacaacaaacggcacagacaccaatcactcacagaacagtcactggttttggattcttgntttcctngcaaaaaaaaangttctctaaaaatccttcnccccccaatgaaatgnnnnngncgggaaaaaaactttnaaaggggagtcttgtcctcnaaaaaaaananagttngcntggggctgcttaaaatttgaacccanctccaaanaggaanangggggncnaaaaanttttttnaaaaaccccccccccaaccnaa

SEQ ID NO: 692 - DNA, 1079 bp, Homo sapiens
  misc_feature (814)..(814): n is a, c, g, or t
  misc_feature (844)..(844): n is a, c, g, or t
  misc_feature (863)..(863): n is a, c, g, or t
  misc_feature (872)..(872): n is a, c, g, or t
  misc_feature (880)..(880): n is a, c, g, or t
  misc_feature (886)..(886): n is a, c, g, or t
  misc_feature (893)..(893): n is a, c, g, or t
  misc_feature (895)..(895): n is a, c, g, or t
  misc_feature (922)..(922): n is a, c, g, or t
  misc_feature (933)..(933): n is a, c, g, or t
  misc_feature (939)..(939): n is a, c, g, or t
  misc_feature (942)..(942): n is a, c, g, or t
  misc_feature (945)..(945): n is a, c, g, or t
  misc_feature (954)..(954): n is a, c, g, or t
  misc_feature (961)..(961): n is a, c, g, or t
  misc_feature (963)..(963): n is a, c, g, or t
  misc_feature (969)..(969): n is a, c, g, or t
  misc_feature (973)..(973): n is a, c, g, or t
  misc_feature (975)..(975): n is a, c, g, or t
  misc_feature (984)..(985): n is a, c, g, or t
  misc_feature (998)..(998): n is a, c, g, or t
  misc_feature (1001)..(1001): n is a, c, g, or t
  misc_feature (1011)..(1011): n is a, c, g, or t
  misc_feature (1013)..(1014): n is a, c, g, or t
  misc_feature (1039)..(1039): n is a, c, g, or t
  misc_feature (1044)..(1044): n is a, c, g, or t
  misc_feature (1047)..(1047): n is a, c, g, or t
  misc_feature (1049)..(1049): n is a, c, g, or t
  misc_feature (1072)..(1072): n is a, c, g, or t
  misc_feature (1079)..(1079): n is a, c, g, or t
gcggacgcgtgggttctggcgaccgtccccacccgggctcgcgtctccgtttctccgagaggcccaaggtgtctccgccgcagcctctgtcgcgccgtgacctgtacaggtcgcgggagtcgtagggaggacgccgggacacctggaagccgagaaatggattcagtggcctttgaggatgtggctgtgaacttcaccctggaggagtgggctttgctggatccttcccagaagaatctctacagggatgtgatgcgggaaaccttcaggaacctggcttctgtaggaaaacaatgggaagaccagaacattgaagacccattcaaaattcccaggagaaatataagtcatattccagagagactctgtgaaagtaaagaaggtggtcaaggtgaagaaaccttcagccagattccagatggtattctgaacaagaaaactcctggagtaaaaccgtgtgaaagcagtgtgtgtggagaagttggcatgggtccttcatcacttaataggcacatcagagatcacactggacgtgaaccaaatgaatatcaggaatatggaaagaagtcatatacacgtaaccagtgtggacgagccttgagttatcatcgctcttttccagtacgtgaaaggactcatcctggaggaaagccctatgattgtaaggaatgtggagaaacctttatttctcttgtaagcattcgaagacacatgttaacgcataggggaggtgtaccttacaaatgtaaggtgtgtgggaaagcctttgattatcccagtttatttcgtatacatgaaagaagtcacactgganaaaaaccttatgaatgcaagcaatgtgggnaaagccttcagttgttccngttacattnaaaatacntgaaanggactcncnctggaaaataaaccctatgaatgcaanccagtgggggnaaaacnttncanttgttccangtacatncnaatccntgancnaactccccnnggaaaaaaacccnacnaatgtaaaangnnggggtaaagcctttagggggccccnttttnttncnaatccccaaaagacccccccggnaaaaaan

SEQ ID NO: 693 - DNA, 1098 bp, Homo sapiens
  misc_feature (729)..(729): n is a, c, g, or t
  misc_feature (767)..(767): n is a, c, g, or t
  misc_feature (783)..(783): n is a, c, g, or t
  misc_feature (788)..(788): n is a, c, g, or t
  misc_feature (790)..(790): n is a, c, g, or t
  misc_feature (796)..(796): n is a, c, g, or t
  misc_feature (818)..(818): n is a, c, g, or t
  misc_feature (838)..(838): n is a, c, g, or t
  misc_feature (858)..(858): n is a, c, g, or t
  misc_feature (907)..(907): n is a, c, g, or t
  misc_feature (911)..(911): n is a, c, g, or t
  misc_feature (918)..(918): n is a, c, g, or t
  misc_feature (923)..(923): n is a, c, g, or t
  misc_feature (936)..(936): n is a, c, g, or t
  misc_feature (951)..(951): n is a, c, g, or t
  misc_feature (967)..(967): n is a, c, g, or t
  misc_feature (979)..(979): n is a, c, g, or t
  misc_feature (987)..(987): n is a, c, g, or t
  misc_feature (1003)..(1003): n is a, c, g, or t
  misc_feature (1005)..(1005): n is a, c, g, or t
  misc_feature (1012)..(1012): n is a, c, g, or t
  misc_feature (1019)..(1019): n is a, c, g, or t
  misc_feature (1024)..(1025): n is a, c, g, or t
  misc_feature (1031)..(1032): n is a, c, g, or t
  misc_feature (1042)..(1042): n is a, c, g, or t
  misc_feature (1049)..(1049): n is a, c, g, or t
  misc_feature (1053)..(1054): n is a, c, g, or t
  misc_feature (1062)..(1062): n is a, c, g, or t
  misc_feature (1066)..(1066): n is a, c, g, or t
  misc_feature (1068)..(1069): n is a, c, g, or t
  misc_feature (1073)..(1073): n is a, c, g, or t
  misc_feature (1084)..(1084): n is a, c, g, or t
  misc_feature (1093)..(1093): n is a, c, g, or t
  misc_feature (1096)..(1096): n is a, c, g, or t
gccggcacctaccacggggacagcgacctgcagctggaccgcatctctgtgtactacaatgaagccacaggtggcaaatatgttcctcgtgccatcctggtggatctagaacctgggaccatggactctgttcgctcaggtccttttggccagatctttagaccagacaactttgtatttggtcagtctggggcaggtaacaactgggccaaaggccactacacagagggcgccgagctggttgattctgtcctggatgtggtacggaaggaggcagagagctgtgactgcctgcagggcttccagctgacccactcactgggcgggggcacaggctctggaatgggcactctccttatcagcaagatccgagaagaataccctgatcgcatcatgaataccttcagtgtggtgccttcacccaaagtgtctgacaccgtggtcgagccctacaatgccaccctctccgtccatcagttggtagagaatactgatgagacctattgcattgacaacgaggccctctatgatatctgcttccgcactctgaagctgaccacaccaacctacggggatctgaaccaccttgtctcagccaccatgagtggtgtcaccacctgcctccgtttccctggccagctcaatgctgacctccgcaagttggcagtcaacatggtccccttcccacgtctccatttctttatgcctggctttgcccctctcaccaanccgtggaaagccagcagtatcgagctctcacagtgccnggaactcacccagcangtctncnatgccnaagaacatgatggctggcctgngacccccgccacggccgaanacctccccgtggctgctgtntttcgtggtcggatgtccatgaaggaagttcaataaacaaatgcttaangtgnaaaaaanaacanccacctacttttngggaaaggatccccnaaaatgttcaaaaaanccgtctgggaanttcccccncccgggccccaaaagnantcccttntttgggnaaaannaaaccnncaggaaactntttaagncctnntcgaaaanttantnncctnttccccggaanggctttccnccntg

SEQ ID NO: 694 - DNA, 974 bp, Homo sapiens
  misc_feature (650)..(650): n is a, c, g, or t
  misc_feature (707)..(707): n is a, c, g, or t
  misc_feature (733)..(733): n is a, c, g, or t
  misc_feature (739)..(739): n is a, c, g, or t
  misc_feature (748)..(748): n is a, c, g, or t
  misc_feature (784)..(784): n is a, c, g, or t
  misc_feature (795)..(796): n is a, c, g, or t
  misc_feature (799)..(799): n is a, c, g, or t
  misc_feature (812)..(812): n is a, c, g, or t
  misc_feature (818)..(818): n is a, c, g, or t
  misc_feature (843)..(843): n is a, c, g, or t
  misc_feature (847)..(847): n is a, c, g, or t
  misc_feature (853)..(854): n is a, c, g, or t
  misc_feature (869)..(869): n is a, c, g, or t
  misc_feature (873)..(873): n is a, c, g, or t
  misc_feature (883)..(883): n is a, c, g, or t
  misc_feature (890)..(890): n is a, c, g, or t
  misc_feature (899)..(899): n is a, c, g, or t
  misc_feature (916)..(916): n is a, c, g, or t
  misc_feature (918)..(918): n is a, c, g, or t
  misc_feature (923)..(923): n is a, c, g, or t
  misc_feature (927)..(927): n is a, c, g, or t
  misc_feature (929)..(929): n is a, c, g, or t
  misc_feature (935)..(935): n is a, c, g, or t
  misc_feature (938)..(938): n is a, c, g, or t
  misc_feature (945)..(946): n is a, c, g, or t
  misc_feature (956)..(956): n is a, c, g, or t
  misc_feature (961)..(961): n is a, c, g, or t
  misc_feature (966)..(966): n is a, c, g, or t
  misc_feature (970)..(970): n is a, c, g, or t
  misc_feature (973)..(974): n is a, c, g, or t
gcccaggacaagacaagccgctctgcactccctgatgcggcccctgtgaccaaagacagtggtcctgggagcacaagaggagaaaaggaagacacgttattgacaaccatgcttcgaaacggagctcccctcaccagactcccgagtgacaagctgaaagcagtcatccccccattcctacccccttccagttttgagctgtggagctctgatcggtcccggacgcgtcacaacgggaaggcagaccccatgaagactgcgctgccccagagagccagcaggggccaccccgtgggcggcgggggcacagacactacacccgtcaggcctgttaaatttccaagcctccccagaagcccagcctcttctgccaattctggaaacttcaaccactcgcctcattcatcgggcggctccagtgggataggtgtgagccggcacggtggggagctgcttaaccgctcaggtggcagcatagacaatgtcttgtcccaaatcgctgcccagaggaaaaaagcagccggattattggagcagaaacccagccatcggtcaagccctgtggggccagcaccggggtccagcccgtctgagcttccagcctcccctgcaggtggcagcgctcctgttggcaagaaattggagaccancaaaaggcctccatctggaacttccactacctccaagagcacctctccaaccctcangccctcccccttcaccaaagggcacnctgcanagtcctcantgtcttcctcgtcatcccatcggcagtcaaaaacantgggggctccnncantggcaccatccanaatgangatgaactgactggaattccttaanaaanttatcnnttgaaaaaatatcancccnattttttgangaacaanaaggtgganatggaaacgtttcttcnanctganttgnanggtganttnaaagganntgggaaattnaaaanaaaangggntcnn

SEQ ID NO: 695 - DNA, 984 bp, Homo sapiens
  misc_feature (548)..(548): n is a, c, g, or t
  misc_feature (632)..(632): n is a, c, g, or t
  misc_feature (644)..(644): n is a, c, g, or t
  misc_feature (654)..(654): n is a, c, g, or t
  misc_feature (664)..(664): n is a, c, g, or t
  misc_feature (673)..(673): n is a, c, g, or t
  misc_feature (697)..(697): n is a, c, g, or t
  misc_feature (709)..(709): n is a, c, g, or t
  misc_feature (716)..(716): n is a, c, g, or t
  misc_feature (734)..(734): n is a, c, g, or t
  misc_feature (746)..(746): n is a, c, g, or t
  misc_feature (748)..(748): n is a, c, g, or t
  misc_feature (750)..(750): n is a, c, g, or t
  misc_feature (755)..(755): n is a, c, g, or t
  misc_feature (757)..(757): n is a, c, g, or t
  misc_feature (759)..(759): n is a, c, g, or t
  misc_feature (769)..(769): n is a, c, g, or t
  misc_feature (772)..(772): n is a, c, g, or t
  misc_feature (774)..(774): n is a, c, g, or t
  misc_feature (788)..(788): n is a, c, g, or t
  misc_feature (793)..(793): n is a, c, g, or t
  misc_feature (811)..(811): n is a, c, g, or t
  misc_feature (829)..(829): n is a, c, g, or t
  misc_feature (838)..(838): n is a, c, g, or t
  misc_feature (845)..(845): n is a, c, g, or t
  misc_feature (851)..(851): n is a, c, g, or t
  misc_feature (853)..(853): n is a, c, g, or t
  misc_feature (857)..(858): n is a, c, g, or t
  misc_feature (869)..(869): n is a, c, g, or t
  misc_feature (872)..(872): n is a, c, g, or t
  misc_feature (876)..(876): n is a, c, g, or t
  misc_feature (886)..(886): n is a, c, g, or t
  misc_feature (888)..(889): n is a, c, g, or t
  misc_feature (907)..(907): n is a, c, g, or t
  misc_feature (910)..(910): n is a, c, g, or t
  misc_feature (912)..(912): n is a, c, g, or t
  misc_feature (924)..(924): n is a, c, g, or t
  misc_feature (931)..(931): n is a, c, g, or t
  misc_feature (937)..(937): n is a, c, g, or t
  misc_feature (949)..(949): n is a, c, g, or t
  misc_feature (955)..(955): n is a, c, g, or t
  misc_feature (959)..(959): n is a, c, g, or t
  misc_feature (964)..(964): n is a, c, g, or t
  misc_feature (970)..(970): n is a, c, g, or t
gggccggggccgggaccgggaccctcgcggcagacatggacttgcattgtgactgtgccgccgaaacgccggccgccgagccgccgtcggggaagattaataaagctgccttcaaattattcaagaagaggaaatcgggtggcaccatgcccagcatttttggggtcaaaaacaaaggggacgggaaaagctcgggtccgacggggctggtgaggagcaggacccacgacggacttgccgaggtgctggtgctggagagcggcaggaaggaggagccgcgcggcgggggcgacagcggcgggggcggcggggggcggccgaacccggggccccccagagccgcagggcccggcgggggctccctcgccagcagctcggtggccaagtcgcacagcttcttctcgctgctgaagaagaacgggcgctcggaaaacggcaagggagagcctgtggacgcgagcaaggccggcggcaaacaaaagcgggggctgcgggggctgttcagcggcatgcgctggcacaggaaagacaagcgggccaaggcggangccgcggaggggcgcgcgcccgggggcggcttgatcctacccggctcgctcaccgccagcctggagtgcgtcaaggaggagacncccagagccgcncgcgagccgnaagaacccancccaggacncccccgcgagacccagccaggctnttggagatattntttgcanaccaagaaggaataggcnggtcccagcttntnanaaagnantnttccccgggncangncaaagcccggtttnttttntaaaaaaaaaaccccggntttggtggcctaccaagnaagccgggnaaaaaantggccnancccnngaacaaagttnganaaanccctaatctnanngaatttttgggaaaattnctntnccaaaaccctantaactanggaccncaatcccccaanaagggncccnttctnaaagtngcaacctttccctc

SEQ ID NO: 696 - DNA, 691 bp, Homo sapiens
  misc_feature (247)..(247): n is a, c, g, or t
  misc_feature (286)..(286): n is a, c, g, or t
  misc_feature (299)..(299): n is a, c, g, or t
  misc_feature (359)..(359): n is a, c, g, or t
  misc_feature (389)..(389): n is a, c, g, or t
  misc_feature (394)..(394): n is a, c, g, or t
  misc_feature (400)..(400): n is a, c, g, or t
  misc_feature (428)..(428): n is a, c, g, or t
  misc_feature (433)..(433): n is a, c, g, or t
  misc_feature (439)..(439): n is a, c, g, or t
  misc_feature (443)..(443): n is a, c, g, or t
  misc_feature (467)..(467): n is a, c, g, or t
  misc_feature (508)..(508): n is a, c, g, or t
  misc_feature (513)..(513): n is a, c, g, or t
  misc_feature (520)..(521): n is a, c, g, or t
  misc_feature (535)..(535): n is a, c, g, or t
  misc_feature (560)..(561): n is a, c, g, or t
  misc_feature (575)..(575): n is a, c, g, or t
  misc_feature (588)..(588): n is a, c, g, or t
  misc_feature (593)..(593): n is a, c, g, or t
  misc_feature (598)..(598): n is a, c, g, or t
  misc_feature (601)..(601): n is a, c, g, or t
  misc_feature (616)..(616): n is a, c, g, or t
  misc_feature (619)..(619): n is a, c, g, or t
  misc_feature (638)..(638): n is a, c, g, or t
  misc_feature (642)..(642): n is a, c, g, or t
  misc_feature (653)..(655): n is a, c, g, or t
  misc_feature (662)..(662): n is a, c, g, or t
  misc_feature (667)..(667): n is a, c, g, or t
  misc_feature (677)..(678): n is a, c, g, or t
  misc_feature (680)..(681): n is a, c, g, or t
  misc_feature (688)..(688): n is a, c, g, or t
  misc_feature (690)..(690): n is a, c, g, or t
gcccacgcgtccgcccacgcgtccgcccacgcgtccgatcggggcccgggcagccggcagcggacgcgccccccgagcccaccggcccgcgccccgcgccccccacggccccgcggtcccggtcccggccgcatcacccacgtcccccgagccccacgggccatgcccggccggccctaagcgcgggccggggggcgtccccttgcgcccgggccccgcgctggcgccccccgggccgccgcccggngcgggggccatggcgttcaccttcgccgcgttctgctanatgctcaccctgntgctgtgcgcctccctcatcttctttgtcatctggcacatcatagcctttgatgagctgnggaccgacttcaagaaccccatcgaccagnggaancctgcncgggcacgcgagcgtttaaaaaacatcnaacgnatctgntgcntcctgaggaatctggtggtcccanaatactccatccacggactcttctgtctgatgtttttgtgngcaanagagtgnntgatcctgggcctnaaaaatccccctcctcttctaccanntctggaggtaattncaccgtcctgcanatggntctanaangtcatgtatgatgcngtntccatcatgaaatgctganattntcaactattgnnnagaaagnattcntggtgcaaanntnntttctancng

SEQ ID NO: 697 - DNA, 676 bp, Homo sapiens
  misc_feature (646)..(647): n is a, c, g, or t
  misc_feature (651)..(651): n is a, c, g, or t
  misc_feature (653)..(653): n is a, c, g, or t
  misc_feature (657)..(657): n is a, c, g, or t
  misc_feature (659)..(660): n is a, c, g, or t
  misc_feature (665)..(667): n is a, c, g, or t
  misc_feature (669)..(671): n is a, c, g, or t
  misc_feature (673)..(673): n is a, c, g, or t
  misc_feature (675)..(676): n is a, c, g, or t
ggtttccgctcagtggtcgcgtctccgccccccacccaccagtcccgctgcattctcggccgggctctaggcgccatggctccccgcgggaggaagcgtaaggctgaggccgcggtggtcgccgtagccgagaagcgagagaagctggcgaacggcggggagggaatggaggaggcgaccgttgttatcgagcattgcactagctgacgcgtctatgggcgcaacgccgcggccctgagccaggcgctgcgcctggaggccccagagcttccagtaaaggtgaacccgacgaagccccggaggggcagcttcgaggtgacgctgctgcgcccggacggcagcagtgcggagctctggactgggattaagaaggggcccccacgcaaactcaaattccctgagcctcaagaggtggtggaagagttgaagaagtacctgtcgtagggagatttgggtagaagccctcatgctgagctttgtgtccctggtgatgttggaacattaatgatggaacatggccaaacttcagtcatgatcctgaagccatggtttcttccctgccagaaatgaaggttcagttatgaggcaaccctctagtaaggcattgtaaaagttactggatttggtttaataaaagttgaaatanngaananaaanannaaaannnannnanann

SEQ ID NO: 698 - DNA, 1093 bp, Homo sapiens
  misc_feature (794)..(794): n is a, c, g, or t
  misc_feature (812)..(812): n is a, c, g, or t
  misc_feature (814)..(814): n is a, c, g, or t
  misc_feature (834)..(834): n is a, c, g, or t
  misc_feature (844)..(844): n is a, c, g, or t
  misc_feature (851)..(851): n is a, c, g, or t
  misc_feature (873)..(873): n is a, c, g, or t
  misc_feature (894)..(894): n is a, c, g, or t
  misc_feature (910)..(910): n is a, c, g, or t
  misc_feature (936)..(936): n is a, c, g, or t
  misc_feature (944)..(945): n is a, c, g, or t
  misc_feature (954)..(955): n is a, c, g, or t
  misc_feature (961)..(961): n is a, c, g, or t
  misc_feature (974)..(974): n is a, c, g, or t
  misc_feature (978)..(979): n is a, c, g, or t
  misc_feature (983)..(983): n is a, c, g, or t
  misc_feature (992)..(992): n is a, c, g, or t
  misc_feature (1000)..(1000): n is a, c, g, or t
  misc_feature (1010)..(1010): n is a, c, g, or t
  misc_feature (1017)..(1017): n is a, c, g, or t
  misc_feature (1036)..(1036): n is a, c, g, or t
  misc_feature (1048)..(1048): n is a, c, g, or t
  misc_feature (1053)..(1053): n is a, c, g, or t
  misc_feature (1060)..(1060): n is a, c, g, or t
  misc_feature (1068)..(1068): n is a, c, g, or t
  misc_feature (1070)..(1070): n is a, c, g, or t
  misc_feature (1083)..(1083): n is a, c, g, or t
gtagcccctaccttgaaattgtacagtgtggaggggatgttagtgcctacctgtgacctttctgctccactgctcagcaagatgaggtaaggttgggtgtcagaggggacctccagcttctctgaagagccagcccttaaggcacttggagcaaaggtcattgagatcagctttatgtggagtaaggaggaggcctgggaaccgcttgtggcatcagttggggcgacaggtggatgagtgtgctctgatggagcttttacggcccacagccactgccaggagcctgagctcttccccatgcttgggacacgttccttggtccccacagcagaatggacattgaattttggtgcttttccctttggtagaaggtggaggtatctgaggagttgtttctgtcttgctacctctgtctactatatagagcaagagtcgggaatagggagatgtgtgagaatcactctcccatggatcagtgtgggccctgtccctcttccccactgtcaccaaccagcagcttggggaaaaggctctgtcgtggatttttgctgcctgcttcccgcttccactcttcttggcggtagatgttcatggtgatccactttgggcggtctgaaagtaggaggtgggggaagaggcaagcctgcacacacacttcctgtccacagggggttgcctgtggcattggagggtggagtctcagagtccagggactgggaggaaggtacttgatgggaatggtcttgattctggaactttaaactgaggtgttaaaaaagggaattgttggctangggaaaaaaaacaatttnancgctcccacttgctaagtcntctgtatcantgtccanaaggtcttgacctcccattcanaattaatttcctaactgccangtgtggggctgggganaaaaggccccaaaagggggcccaatncctgaacnngaaggaacnnatcccnctttcatgccagngaannccgncccctgggncttcaagntttttccctnccccagnaaggaaatttgatcctgcngaaaaaaattcnccccnccccccntgggggcnanttttaaaaaaccntcttccccca

SEQ ID NO: 699 - DNA, 994 bp, Homo sapiens
  misc_feature (2)..(2): n is a, c, g, or t
  misc_feature (687)..(687): n is a, c, g, or t
  misc_feature (819)..(819): n is a, c, g, or t
  misc_feature (844)..(844): n is a, c, g, or t
  misc_feature (854)..(854): n is a, c, g, or t
  misc_feature (860)..(860): n is a, c, g, or t
  misc_feature (864)..(864): n is a, c, g, or t
  misc_feature (875)..(875): n is a, c, g, or t
  misc_feature (878)..(878): n is a, c, g, or t
  misc_feature (885)..(885): n is a, c, g, or t
  misc_feature (892)..(892): n is a, c, g, or t
  misc_feature (896)..(896): n is a, c, g, or t
  misc_feature (907)..(907): n is a, c, g, or t
  misc_feature (910)..(910): n is a, c, g, or t
  misc_feature (915)..(915): n is a, c, g, or t
  misc_feature (928)..(928): n is a, c, g, or t
  misc_feature (932)..(932): n is a, c, g, or t
  misc_feature (940)..(940): n is a, c, g, or t
  misc_feature (952)..(952): n is a, c, g, or t
  misc_feature (956)..(957): n is a, c, g, or t
  misc_feature (960)..(960): n is a, c, g, or t
  misc_feature (965)..(965): n is a, c, g, or t
  misc_feature (969)..(970): n is a, c, g, or t
  misc_feature (979)..(979): n is a, c, g, or t
  misc_feature (982)..(982): n is a, c, g, or t
  misc_feature (986)..(986): n is a, c, g, or t
  misc_feature (989)..(989): n is a, c, g, or t
gnatagagagaattactatgagaggatcgcatcaccatcaccatcacggatcctatttaggtgacactatagaatcgtcgacccacgcgctccgagacaagggacgcagacaatcggcacattgtgagcaggggctgcaggatggaaccagcaagctgctgtgctgagcgccccaaacctgggcctacaggggtgaagaccaagccctcctgcgggggctggagagccgtgagcctgctcctgctgctgctgctgctggtgctggccgctgtgggggttgtggctggagggcttcttggctctgctcagggccctcccaagccaaggctgcagacgctgcgaatgaccctcccgagcccccacatgccccggcccaaccaaaccatcctggtggacgtggcccggaacgcggcgaccatcacagtgaccccacctcagagcaaccacagctgggcggtgctgttcgacgggcagagcggctgcatctgttaccgccctgaggagcaccaggtctgcttcctccgcctgatggaggacagtgatcgggagaccctgcggctgctggtggatacctccaaggtccaagaggcttgggtccccagccaggacacccaccacacccaggagctgctggcagtgcaggggagcctcgaagtggaccccgcccaggcgggggctttggtgcancgcctgtgcatgaggacccccatctactgggcccggcgagcagaggggccccggaaacagcggctgatttatctctgcatcgacatctgcttcccgagcaaaatctgcgtctcggtctgcttttattacctncccaaactgaacccccgacctgggnccagcctggncccgtncccnaattccaagtnggnttggccnaggccanctgnaccaagggaanaanaactncttggcaaggaantaanaaaacccnttccccctgggnaaannaanattanaatnnaataaaaanaantatnaanaaaaa

SEQ ID NO: 700 - DNA, 1028 bp, Homo sapiens
  misc_feature (738)..(738): n is a, c, g, or t
  misc_feature (752)..(752): n is a, c, g, or t
  misc_feature (757)..(757): n is a, c, g, or t
  misc_feature (787)..(787): n is a, c, g, or t
  misc_feature (798)..(798): n is a, c, g, or t
  misc_feature (816)..(816): n is a, c, g, or t
  misc_feature (819)..(819): n is a, c, g, or t
  misc_feature (857)..(857): n is a, c, g, or t
  misc_feature (859)..(859): n is a, c, g, or t
  misc_feature (916)..(917): n is a, c, g, or t
  misc_feature (920)..(920): n is a, c, g, or t
  misc_feature (927)..(927): n is a, c, g, or t
  misc_feature (929)..(929): n is a, c, g, or t
  misc_feature (946)..(947): n is a, c, g, or t
  misc_feature (951)..(951): n is a, c, g, or t
  misc_feature (957)..(957): n is a, c, g, or t
  misc_feature (968)..(968): n is a, c, g, or t
  misc_feature (973)..(973): n is a, c, g, or t
  misc_feature (985)..(985): n is a, c, g, or t
  misc_feature (991)..(992): n is a, c, g, or t
  misc_feature (1009)..(1009): n is a, c, g, or t
  misc_feature (1013)..(1017): n is a, c, g, or t
  misc_feature (1021)..(1021): n is a, c, g, or t
  misc_feature (1023)..(1024): n is a, c, g, or t
  misc_feature (1027)..(1027): n is a, c, g, or t
gggccagccccttgtcctctgccttctgctggcagaggagcagctggactggggccttttggcacagcagccggtgtctcctgcgcccgcctcccccatggccccatgcagccccaggggcttcccccctgcccatggagtagagcccgagatcctggccactatgccagttctgacctcgcatccccctaccccgagcccatgcagtctgggaacatgccgccttctctccagcctctgtgcctttgttccaggtggtctcaccctcctgtccctggctgggctaggtggtcctgtccaggctcctgcagcgcccccctcactttgacactggactaggatgcagcctcccttctgtgtccccttgagggtaccctgggtcccctcatcaggggcagaggcatgaaagagtcggggctggatggccaggggcttctgggcccgacgcctagtgcagcccctggggtcgtggtttgacatttgtctgcctggtgcaaacaaggaatccttgcctttaaggtgacaggccctccacaggcttccagacttgaaggaaaaggtttaagaaagaaaacaaaaccaacagttagtggagtcaaagcccagacactgtaaatagaaccccctccaccaccccccgccgcccagcatcctacctggactgcggtgctacgagggcctgcgggccttttgctgtgtgccaaccctccctgtaagtctatttaaaaaacatcgacnaaacattgaaaatntgtgnaacgtttttgaaaaagctacagcttccaancaaccaaaaancaaactgtttgttttggnaanaacggtcctgatgtaaaaaccttgaattgaaaattcantngctcaccttgaaaacgttaattcaaaaacccaaaggaaatggctggtccccatcccnnatntgggctngngtggaacctcaaccttnntttntgtggnaaattttaatnaaaanttggtccccccnaaaatnnaacaaaaaaaaaaaaanaaannnnnaaanannaana

SEQ ID NO: 701 - DNA, 1198 bp, Homo sapiens
  misc_feature (114)..(114): n is a, c, g, or t
  misc_feature (718)..(718): n is a, c, g, or t
  misc_feature (813)..(813): n is a, c, g, or t
  misc_feature (819)..(819): n is a, c, g, or t
  misc_feature (843)..(843): n is a, c, g, or t
  misc_feature (845)..(845): n is a, c, g, or t
  misc_feature (848)..(848): n is a, c, g, or t
  misc_feature (851)..(851): n is a, c, g, or t
  misc_feature (881)..(881): n is a, c, g, or t
  misc_feature (890)..(890): n is a, c, g, or t
  misc_feature (894)..(894): n is a, c, g, or t
  misc_feature (896)..(896): n is a, c, g, or t
  misc_feature (901)..(901): n is a, c, g, or t
  misc_feature (924)..(924): n is a, c, g, or t
  misc_feature (927)..(927): n is a, c, g, or t
  misc_feature (934)..(934): n is a, c, g, or t
  misc_feature (954)..(954): n is a, c, g, or t
  misc_feature (957)..(958): n is a, c, g, or t
  misc_feature (964)..(964): n is a, c, g, or t
  misc_feature (975)..(975): n is a, c, g, or t
  misc_feature (985)..(985): n is a, c, g, or t
  misc_feature (988)..(988): n is a, c, g, or t
  misc_feature (1007)..(1007): n is a, c, g, or t
  misc_feature (1020)..(1020): n is a, c, g, or t
  misc_feature (1023)..(1023): n is a, c, g, or t
  misc_feature (1033)..(1033): n is a, c, g, or t
  misc_feature (1036)..(1036): n is a, c, g, or t
  misc_feature (1039)..(1039): n is a, c, g, or t
  misc_feature (1048)..(1048): n is a, c, g, or t
  misc_feature (1053)..(1053): n is a, c, g, or t
  misc_feature (1055)..(1055): n is a, c, g, or t
  misc_feature (1066)..(1066): n is a, c, g, or t
  misc_feature (1068)..(1068): n is a, c, g, or t
  misc_feature (1077)..(1077): n is a, c, g, or t
  misc_feature (1083)..(1083): n is a, c, g, or t
  misc_feature (1087)..(1088): n is a, c, g, or t
  misc_feature (1090)..(1090): n is a, c, g, or t
  misc_feature (1110)..(1110): n is a, c, g, or t
  misc_feature (1114)..(1114): n is a, c, g, or t
  misc_feature (1119)..(1119): n is a, c, g, or t
  misc_feature (1122)..(1122): n is a, c, g, or t
  misc_feature (1144)..(1144): n is a, c, g, or t
  misc_feature (1149)..(1150): n is a, c, g, or t
  misc_feature (1154)..(1156): n is a, c, g, or t
  misc_feature (1161)..(1161): n is a, c, g, or t
  misc_feature (1163)..(1163): n is a, c, g, or t
  misc_feature (1196)..(1196): n is a, c, g, or t
  misc_feature (1198)..(1198): n is a, c, g, or t
ggacgcggaggatgctggcgccccgctggtgtacgccctgctgctgcagcgctgtcgccagggccactgcgaggagttctgtgtctacaagggcagcctctccggctacggagncgtgctgcccccgggtttcaggccacacttcgaggtgggcctggccgtggtggtgcaggaccagctgggagccgctgtggtcgccctcaacaggtctctggccatcaccctcccagagcccaacggcagcgcaatggggctcacagtctggctgcacgggctcaccgctagtgtgctcccggggctgctgcggcaggccgatccccagcacgtcatcgagtactcgctggccctggtcactgtgctgaacgagtacgagcgggccctggacgtggcggcagagcccaagcacgagcggcagcgccgagcccagatacgcaagaacatcacggagactctggtgtccctgagggtccacactgtggatgacatccagcagatcgctgctgcgctggcccagtgcatggggcccagcagggagctcgtatgccgctcgtgcctgaagcagacgctgcacaagctggaggccatgatgcgcatcctgcaggcagagaccaccgcgggcaccgtgacgcccaccgccatcggagacagcatcctcaacatcacaggagacctcatccacctggccagctcagacgtgcgggcaccacagcgctcaganctgggagccgagtcaccatcgcggatggtggcgtcccaggcctacaacctgacctctgccctcacgcccatcgtcacgcgctcccgcgtgctaangaggancccctgaacgctggcgggcttttnancanggnccccggccaacctcagtgacgtggtgcacntcatctttntggngnactcnaatcccttttcctttggctaaancanaaataanaccgtttccaccaaggtggnctnnaatggngtttcaaaaanaaggccggcnccnaaaatccccatcaaggggntggccttaaaaanggncctcaccgtnaangcnccttacttnttttnanaaacccaaccntnccttggaantttaanttgnntncgaaacccggcccaataaancaanttttntgnttaaaaaaaaatcccccaaaantcctnnaggnnncaaanangggcctaatttttttttttccgggaaaaaaaancn

SEQ ID NO: 702 - DNA, 1093 bp, Homo sapiens
  misc_feature (3)..(3): n is a, c, g, or t
  misc_feature (89)..(89): n is a, c, g, or t
  misc_feature (709)..(709): n is a, c, g, or t
  misc_feature (760)..(760): n is a, c, g, or t
  misc_feature (762)..(762): n is a, c, g, or t
  misc_feature (770)..(770): n is a, c, g, or t
  misc_feature (788)..(788): n is a, c, g, or t
  misc_feature (795)..(795): n is a, c, g, or t
  misc_feature (813)..(813): n is a, c, g, or t
  misc_feature (856)..(856): n is a, c, g, or t
  misc_feature (868)..(868): n is a, c, g, or t
  misc_feature (874)..(874): n is a, c, g, or t
  misc_feature (878)..(878): n is a, c, g, or t
  misc_feature (882)..(882): n is a, c, g, or t
  misc_feature (908)..(908): n is a, c, g, or t
  misc_feature (923)..(923): n is a, c, g, or t
  misc_feature (942)..(942): n is a, c, g, or t
  misc_feature (948)..(948): n is a, c, g, or t
  misc_feature (950)..(950): n is a, c, g, or t
  misc_feature (959)..(959): n is a, c, g, or t
  misc_feature (970)..(970): n is a, c, g, or t
  misc_feature (976)..(977): n is a, c, g, or t
  misc_feature (989)..(989): n is a, c, g, or t
  misc_feature (999)..(999): n is a, c, g, or t
  misc_feature (1008)..(1008): n is a, c, g, or t
  misc_feature (1011)..(1011): n is a, c, g, or t
  misc_feature (1017)..(1018): n is a, c, g, or t
  misc_feature (1023)..(1023): n is a, c, g, or t
  misc_feature (1043)..(1043): n is a, c, g, or t
  misc_feature (1046)..(1046): n is a, c, g, or t
  misc_feature (1054)..(1054): n is a, c, g, or t
  misc_feature (1057)..(1057): n is a, c, g, or t
  misc_feature (1059)..(1059): n is a, c, g, or t
  misc_feature (1064)..(1066): n is a, c, g, or t
  misc_feature (1068)..(1068): n is a, c, g, or t
  misc_feature (1070)..(1070): n is a, c, g, or t
  misc_feature (1072)..(1073): n is a, c, g, or t
  misc_feature (1087)..(1087): n is a, c, g, or t
  misc_feature (1091)..(1091): n is a, c, g, or t
gantagagaaattactatgagaggatcgcatcaccatcaccatcacggatcctatttaggtgacactatagaatcgtcgacccacgcgntccgcccacgcgtccggctgcagctcgcccaccccacgacccacacacccctctgcctgccccagcccgcccatcgcttcccctttggagcctcctgctgggccactggctgggatcaggacaccagtgatgctcctgggaccctacgcaatctgcgcctgcgtctcatcagtcgccccacatgtaactgtatctacaaccagctgcaccagcgacacctgtccaacccggcccggcctgggatgctatgtgggggcccccagcctggggtgcagggcccctgtcagggagattccgggggccctgtgctgtgcctcgagcctgacggacactgggttcaggctggcatcatcagctttgcatcaagctgtgcccaggaggacgctcctgtgctgctgaccaacacagctgctcacagttcctcctgcaggctcgagttcagggggcagctttcctggcccagagcccagagaccccggagatgagtgatgaggacagctgtgtagcctgtggatccttgaggacagcaggtccccaggcaggagcaccctccccatggccctgggaggccaggctgatgcaccagggacagctggcctgtggcggagccctggtgtcanaggaggcggtgctaactgctgcccactgcttcattgggcgccaggccccanangaatggancgtaaggctggggaccanaccggangagtggggcctgaaacanctcatcctgcatggagcctacacccaccctgaggggggctaanaaatggccctcntgctgntggnccancctgtgaaactggggaaccagcctgnggcccctctgcctgncctatcctgaacaacaacntgcctnanggggaaacntggctgggttntgggannggcccccccaanaaaaaggaancaacttccntcnaaaaannggccngtgaaacctccttggggccnaanggccttgnaancnggttnnnangnannttcttgggggtgantggnaa

SEQ ID NO: 703 - DNA, 655 bp, Homo sapiens
  misc_feature (98)..(98): n is a, c, g, or t
  misc_feature (530)..(530): n is a, c, g, or t
  misc_feature (546)..(546): n is a, c, g, or t
  misc_feature (562)..(562): n is a, c, g, or t
  misc_feature (564)..(564): n is a, c, g, or t
  misc_feature (572)..(572): n is a, c, g, or t
  misc_feature (575)..(575): n is a, c, g, or t
  misc_feature (588)..(588): n is a, c, g, or t
  misc_feature (602)..(602): n is a, c, g, or t
  misc_feature (604)..(605): n is a, c, g, or t
  misc_feature (614)..(614): n is a, c, g, or t
  misc_feature (621)..(621): n is a, c, g, or t
  misc_feature (623)..(623): n is a, c, g, or t
  misc_feature (628)..(628): n is a, c, g, or t
  misc_feature (635)..(635): n is a, c, g, or t
  misc_feature (638)..(638): n is a, c, g, or t
  misc_feature (640)..(642): n is a, c, g, or t
  misc_feature (644)..(645): n is a, c, g, or t
  misc_feature (647)..(647): n is a, c, g, or t
  misc_feature (649)..(649): n is a, c, g, or t
  misc_feature (651)..(652): n is a, c, g, or t
  misc_feature (655)..(655): n is a, c, g, or t
gacttcaccgagtgggcctctctctttcggcactactccccacccccatttggcctgctgggaaccgctccagcttacagctttggaatcgcaggagntgcgctcgggggtgcccttccactggcatggacccgggtactcagaagtgatctacggtcgtaagcgctggttcctttacccacctgagaagacgccagagttccaccccaacaagaccacgctggcctggctccgggacacatacccagccctgccaccgtctgcacggcccctggagtgtaccatccgggctggtgaggtgctgtacttccccgaccgctggtggcatgctacgctcaaccttgacaccagcgtcttcatctccaccttcctcggctagccaaaacagctggcaggactgccggtcacacaccagcacgtcccacctcgtgctcacggattttattacacagatagtggcggcaatggcctcagcccagcccaccctcacctgcttttccagcccacaaagggggacgatcacggcccancaaaagcgatgctganaggggaaacagtccanantccaacancanaacttgggggaancggtcggggtggcnannaacataaantatgtanangggcngggggcntcngnnnanngntncnntgn

SEQ ID NO: 704 - DNA, 1031 bp, Homo sapiens
  misc_feature (724)..(724): n is a, c, g, or t
  misc_feature (726)..(726): n is a, c, g, or t
  misc_feature (760)..(760): n is a, c, g, or t
  misc_feature (802)..(802): n is a, c, g, or t
  misc_feature (804)..(804): n is a, c, g, or t
  misc_feature (811)..(811): n is a, c, g, or t
  misc_feature (820)..(820): n is a, c, g, or t
  misc_feature (843)..(843): n is a, c, g, or t
  misc_feature (846)..(846): n is a, c, g, or t
  misc_feature (849)..(849): n is a, c, g, or t
  misc_feature (851)..(851): n is a, c, g, or t
  misc_feature (862)..(864): n is a, c, g, or t
  misc_feature (878)..(878): n is a, c, g, or t
  misc_feature (880)..(880): n is a, c, g, or t
  misc_feature (891)..(891): n is a, c, g, or t
  misc_feature (902)..(902): n is a, c, g, or t
  misc_feature (920)..(920): n is a, c, g, or t
  misc_feature (922)..(922): n is a, c, g, or t
  misc_feature (930)..(930): n is a, c, g, or t
  misc_feature (932)..(932): n is a, c, g, or t
  misc_feature (943)..(943): n is a, c, g, or t
  misc_feature (946)..(946): n is a, c, g, or t
  misc_feature (955)..(955): n is a, c, g, or t
  misc_feature (961)..(961): n is a, c, g, or t
  misc_feature (963)..(963): n is a, c, g, or t
  misc_feature (968)..(968): n is a, c, g, or t
  misc_feature (971)..(972): n is a, c, g, or t
  misc_feature (981)..(983): n is a, c, g, or t
  misc_feature (988)..(988): n is a, c, g, or t
  misc_feature (1003)..(1003): n is a, c, g, or t
  misc_feature (1028)..(1028): n is a, c, g, or t
ggtaacaaatatgttcctcgggccatcctcgtggatctggagccaggcacgatggattcggttaggtctggaccattcggccagatcttcagaccagacaatttcgtgtttggccagagtggagccgggaataactgggccaagggccactacacagagggagccgagctggtcgactcggtcctggatgtggtgaggaaggagtcagagagctgtgactgtctccagggcttccagctgacccactctctggggggcggcacggggtccgggatgggcaccctgctcatcagcaagatccgggaagagtacccagaccgcatcatgaacaccttcagcgtcatgccctcacccaaggtgtcagacacggtggtggagccctacaacgccaccctctcggtccaccagctggtggaaaacacagatgaaacctactgcattgacaacgaggccctgtatgacatctgcttccgcaccctgaagctgaccacccccacctacggggacctcaaccacctggtgtcggccaccatgagcggggtcaccacctgcctgcgcttcccgggccagctgaacgcagacctgcgcaagctggcggtgaacatggtgcccttccctcgcctgcacttcttcatgcccggcttcgcgcccctgaccagccggggcagccagcagtaccgggcgctcacggtgcccgagctcacccagcaaatgttcgactccnanaacatgatggccgcctgcgaacccgcgccacggncgctacctgacggtggctgccatcttccgggggccgcatgtncntgaaagnaggtggacnaacaaatgctcaacgtgcaaaanaanaanancacctactttnnnggagtggatccccnanaacgtgaaaanggccggttggnaaattccccccccccggncntgaaaatntnggccacctttnttngggaaaaanacgggncntccangannttgtttaannncattntcccaaaaattttcnggccattttccggcccaaggccttnctt

SEQ ID NO: 705 - DNA, 1100 bp, Homo sapiens
  misc_feature (809)..(809): n is a, c, g, or t
  misc_feature (832)..(832): n is a, c, g, or t
  misc_feature (861)..(861): n is a, c, g, or t
  misc_feature (871)..(871): n is a, c, g, or t
  misc_feature (883)..(883): n is a, c, g, or t
  misc_feature (895)..(895): n is a, c, g, or t
  misc_feature (898)..(898): n is a, c, g, or t
  misc_feature (906)..(906): n is a, c, g, or t
  misc_feature (923)..(923): n is a, c, g, or t
  misc_feature (928)..(928): n is a, c, g, or t
  misc_feature (934)..(935): n is a, c, g, or t
  misc_feature (940)..(940): n is a, c, g, or t
  misc_feature (943)..(943): n is a, c, g, or t
  misc_feature (948)..(948): n is a, c, g, or t
  misc_feature (952)..(952): n is a, c, g, or t
  misc_feature (958)..(958): n is a, c, g, or t
  misc_feature (964)..(964): n is a, c, g, or t
  misc_feature (974)..(974): n is a, c, g, or t
  misc_feature (979)..(979): n is a, c, g, or t
  misc_feature (990)..(990): n is a, c, g, or t
  misc_feature (995)..(995): n is a, c, g, or t
  misc_feature (1008)..(1008): n is a, c, g, or t
  misc_feature (1011)..(1011): n is a, c, g, or t
  misc_feature (1029)..(1029): n is a, c, g, or t
  misc_feature (1039)..(1039): n is a, c, g, or t
  misc_feature (1051)..(1051): n is a, c, g, or t
  misc_feature (1065)..(1065): n is a, c, g, or t
  misc_feature (1089)..(1089): n is a, c, g, or t
  misc_feature (1096)..(1097): n is a, c, g, or t
  misc_feature (1100)..(1100): n is a, c, g, or t
gcactctcaggcctcatcttactggcaggttatattgcttttgacagcttcacctcaaactggcaggatgccctgtttgcctataagatgtcatcggtgcagatgatgtttggggtcaatttcttctcctgcctcttcacagtgggctcactgctagaacagggggccctactggagggaacccgcttcatggggcgacacagtgagtttgctgcccatgccctgctactctccatctgctccgcatgtggccagctcttcatcttttacaccattgggcagtttggggctgccgtcttcaccatcatcatgaccctccgccaggcctttgccatccttctttcctgccttctctatggccacactgtcactgtggtgggagggctgggggtggctgtggtctttgctgccctcctgctcagagtctacgcgcggggccgtctaaagcaacggggaaagaaggctgtgcctgttgagtctcctgtgcagaaggtttgagggtggaaagggcctgaggggtgaagtgaaataggaccctcccaccatccccttctgctgtaacctctgagggagctggctgaaagggcaaaatgcaggtgttttctcagtatcacagaccagctctgcagcaggggattggggagcccaggaggcagccttcccttttgccttaagtcacccatcttccagtaagcagtttattctgagccccgggggtagacagtcctcagtgaggggttttggggagtttggggtcaaaagagcataagtaggttccacagttactcttcccacaagttccctttaantcttgccctaactgtgctctgcnaccttccaaaatcactcccctctgcaaanacctgcattncttaaccctggngaaaaaaaacanaancggggtangctccaatgctgctttnccaanaaaggnnaaaanggngctgngctnaaaaangggaancaaaacctgnccaanaccacacctcnaagcnccggaacccaagnccngttcaagaaacctggtgnaggttttggnaattaaaaaagnaaacttttggcccntaaaaatttaattttaaaaaaatnaaattannggn

SEQ ID NO: 706 - DNA, 1036 bp, Homo sapiens
  misc_feature (765)..(765): n is a, c, g, or t
  misc_feature (830)..(830): n is a, c, g, or t
  misc_feature (833)..(833): n is a, c, g, or t
  misc_feature (841)..(841): n is a, c, g, or t
  misc_feature (849)..(849): n is a, c, g, or t
  misc_feature (865)..(865): n is a, c, g, or t
  misc_feature (885)..(886): n is a, c, g, or t
  misc_feature (891)..(891): n is a, c, g, or t
  misc_feature (893)..(893): n is a, c, g, or t
  misc_feature (913)..(913): n is a, c, g, or t
  misc_feature (921)..(921): n is a, c, g, or t
  misc_feature (950)..(950): n is a, c, g, or t
  misc_feature (965)..(965): n is a, c, g, or t
  misc_feature (970)..(970): n is a, c, g, or t
  misc_feature (975)..(975): n is a, c, g, or t
  misc_feature (978)..(978): n is a, c, g, or t
  misc_feature (990)..(990): n is a, c, g, or t
  misc_feature (999)..(1001): n is a, c, g, or t
  misc_feature (1013)..(1014): n is a, c, g, or t
  misc_feature (1017)..(1017): n is a, c, g, or t
  misc_feature (1021)..(1021): n is a, c, g, or t
  misc_feature (1023)..(1023): n is a, c, g, or t
  misc_feature (1025)..(1026): n is a, c, g, or t
  misc_feature (1028)..(1028): n is a, c, g, or t
  misc_feature (1033)..(1033): n is a, c, g, or t
gggggatctggcggtggagcgctaggatcagacgcccccgcgatgaccagctcccccgtctccagagtcgtgtacaacggcaagaggaccagcagcccccgctccccacccagcagcagcgagatcttcaccccagcccacgaggagaacgtccgcttcatttacgaagcctggcagggtgtggagcgagacctgcgaggccaggtgccgggtggcgagcggggcctggtggaggagtatgtggagaaggtccctaaccccagcctgaagaccttcaagcccatcgacctgagtgacctgaagcgccggagcacgcaggatgccaagaagtcctagagcgcccggtgcccctccccggcctccggaagatcagggtgcgaggtgtcggttccctcctgtcctgtggtcctgcccctgggatgggggtgccttgctccagcgggctgcagatcccagcactggcgtgactgacggctgaggcctgcctctccttcccaagcccccttccttcatccttgggggtctcaggctgcccccatcatgggggtctgggccctgcccaccctcctgccctcccccagccacctggctgcatttttgaagctgcctggcccccaggggccctgacctgacctctctcctctcccctcaccctcctgcccctggccactgcaggatcaggaggggagaagaaggagcctctgctgcctcccaggctgctgggactgggctggttttgtccttgaagtggtcaggatacagganaagggcagccccaccccatccagcctgggctccccgcaaaaccttgctgctcccgtggcctgganacnctggggancttctcanacctaccctacgtcancctggcttttcctgaatcannttaananggcaccactctttggcctangaaactgncgggcccccaagggggtcccaacaaccangcctggcctcctggngtttncggtnaantggcccctgggnagggcaccnnnttaacctgaagnntgntgtngntnntnttggnctg

SEQ ID NO: 707 - DNA, 546 bp, Homo sapiens
  misc_feature (502)..(502): n is a, c, g, or t
  misc_feature (515)..(515): n is a, c, g, or t
  misc_feature (520)..(520): n is a, c, g, or t
  misc_feature (522)..(522): n is a, c, g, or t
  misc_feature (526)..(527): n is a, c, g, or t
  misc_feature (534)..(534): n is a, c, g, or t
  misc_feature (537)..(538): n is a, c, g, or t
  misc_feature (541)..(542): n is a, c, g, or t
  misc_feature (545)..(546): n is a, c, g, or t
gtggcctgctgcgccgtggagatgatgcacatggcagcaccccgctacgacatggaccgctttggcgtggtcttccgcgccagcccgcgccagtccgacgtcatgatcgtggccggcacactcaccaacaagatggccccagcgcttcgcaaggtctacgaccagatgccggagccgcgctacgtggtctccatggggagctgcgccaacggaggaggctactaccactattcctactcggtggtgaggggctgcgaccgcatcgtgcccgtggacatctacatcccagactgagctcctccctccctggggaccgcgctcctccctccctgcggactgtgctccctgtctggggactgcgctcctccctccttggggaccgtgctcctccctccctccctgcggaccgcgctcctccctccctggggaccgcgctcctccctccctgcggaccgcgctcggccctccctggggaccgcgcccctccctcccagcggaccgngctcctccctccntgggnanctcnntcctccntcnntcnntgnn

SEQ ID NO: 708 - DNA, 889 bp, Homo sapiens
  misc_feature (448)..(448): n is a, c, g, or t
  misc_feature (600)..(600): n is a, c, g, or t
  misc_feature (762)..(762): n is a, c, g, or t
  misc_feature (770)..(770): n is a, c, g, or t
  misc_feature (805)..(805): n is a, c, g, or t
  misc_feature (808)..(808): n is a, c, g, or t
  misc_feature (863)..(863): n is a, c, g, or t
  misc_feature (867)..(870): n is a, c, g, or t
  misc_feature (872)..(876): n is a, c, g, or t
  misc_feature (878)..(884): n is a, c, g, or t
  misc_feature (886)..(889): n is a, c, g, or t
gcagacctacaagatggggtactaacaccacccccaccgcccccaccaccacccccagctcctgaggtgctggccagtgcacccccactcccaccctcaaccgcggcccctgtaggccaaggcgccaggcaggacgacagcagcagcagcacgtctccttcagtccagggagctcccagggaagtggtcgacccctccggtggctgggccactctgctagagtccatccgccaagctgggggcatcggcaaggccaagctgcgcagcatgaaggagcgaaagctggagaagaagaagcagaaggagcaggagcaagtgagagccacgagccaaggtgggcacttgatgtcggatctcttcaacaagctggtcatgaggcgcaagggcatctctgggaaaggacctggggctggtgaggggcccggaggagcctttgcccgcgtgtcanactccatccctcctgtgcccccaccgcaacagccacaggcagaggaggacgaggacgactgggaatcctagggggctccatgacaccttcccccccagacccagacttgggctgttgctctgacatggacacagccaggacaagctgctcanacctgcttccctgggagggggtgacggaaccagcactgtgtggagaccagcttcaaggagcggaaggctggcttgaggccacacagctggggcggggacttctgtctgcctgtgctccatggggggacggctccacccagcctgcgccactgtgttcttaanaggcttcnaaagaaaacggcacaccaatcaataaagaactgancanaaaccaacagtgtgctttttaataaaaggacctctagctgtgcaggataaaaaanaaannnnannnnnannnnnnnannnn

SEQ ID NO: 709 - DNA, 1071 bp, Homo sapiens
  misc_feature (756)..(756): n is a, c, g, or t
  misc_feature (801)..(801): n is a, c, g, or t
  misc_feature (823)..(823): n is a, c, g, or t
  misc_feature (845)..(845): n is a, c, g, or t
  misc_feature (848)..(848): n is a, c, g, or t
  misc_feature (853)..(853): n is a, c, g, or t
  misc_feature (857)..(857): n is a, c, g, or t
  misc_feature (862)..(862): n is a, c, g, or t
  misc_feature (868)..(868): n is a, c, g, or t
  misc_feature (894)..(894): n is a, c, g, or t
  misc_feature (900)..(900): n is a, c, g, or t
  misc_feature (911)..(911): n is a, c, g, or t
  misc_feature (914)..(914): n is a, c, g, or t
  misc_feature (917)..(917): n is a, c, g, or t
  misc_feature (923)..(923): n is a, c, g, or t
  misc_feature (926)..(926): n is a, c, g, or t
  misc_feature (933)..(933): n is a, c, g, or t
  misc_feature (947)..(947): n is a, c, g, or t
  misc_feature (949)..(949): n is a, c, g, or t
  misc_feature (955)..(955): n is a, c, g, or t
  misc_feature (959)..(959): n is a, c, g, or t
  misc_feature (971)..(971): n is a, c, g, or t
  misc_feature (973)..(974): n is a, c, g, or t
  misc_feature (978)..(978): n is a, c, g, or t
  misc_feature (985)..(985): n is a, c, g, or t
  misc_feature (1013)..(1013): n is a, c, g, or t
  misc_feature (1024)..(1024): n is a, c, g, or t
  misc_feature (1029)..(1029): n is a, c, g, or t
  misc_feature (1031)..(1031): n is a, c, g, or t
  misc_feature (1040)..(1041): n is a, c, g, or t
  misc_feature (1046)..(1046): n is a, c, g, or t
  misc_feature (1052)..(1052): n is a, c, g, or t
  misc_feature (1066)..(1066): n is a, c, g, or t
  misc_feature (1070)..(1070): n is a, c, g, or t
ggctccatcttcacgggcgcccaggaccctggcctgcagagacgctcccgccacaggatccagagcaagcaccgccccctggacgagcgggccctgcaggagaagctgaagtactttcctgtgtgtgtgagcaccaagccggagcccgaggacgatgcagaagagggacttgggggtcttcccagcaacatcagctctgtcagctccttgctgctcttcaacaccaccgagaacctgtacaagaagtatgtcttcctggaccccctggctggtgctgtaacaaagacccatgtgatgctgggggcagagacagaggagaagctgtttgatgcccccttgtccatcagcaagagagagcagctggaacagcaggtcccagagaactacttctatgtgccagacctgggccaggtgcctgagattgatgttccgtcctacctgcctgacctgcccggcattgccaacgacctcatgtacagtgccgacctgggccccggcattgccccctctgcccctggcaccattccggaactgcccaccttccacactgaggtagccgagcctctcaaggcagacctacaagatggggtactaacagcaccaccaccacccccaccgcccccaccacctcccccagctcctgaggtgctggccagtgcatccccactcccaccctcaaccgcggcccctgtaggccaaggcgccaggcaggacgacagcagcagcagcgcgtctccttcagtccagggagctccnaggaaagtggtcgacccctccggtggccgggccactctgctaaantccatccgccaagctggggggncatcggcaaggccaagctgccncancgtgnaagnaaccnaaaagntggaaaaaaaaaaaaccaaaaaggancaggancaagtgaaaanccnccnacccanggnggggaanttgatgttcggatntnttcaanaaanctggttcttgangnnccangggcatntctgggaaaagaacctgggggctgggtnaggggcccggnagaancnttttccccnntggtnaaatcnatccttcttttgcncccnc

SEQ ID NO: 710 - DNA, 502 bp, Homo sapiens
  misc_feature (345)..(345): n is a, c, g, or t
  misc_feature (413)..(413): n is a, c, g, or t
  misc_feature (450)..(451): n is a, c, g, or t
  misc_feature (462)..(462): n is a, c, g, or t
  misc_feature (464)..(465): n is a, c, g, or t
  misc_feature (468)..(468): n is a, c, g, or t
  misc_feature (475)..(476): n is a, c, g, or t
  misc_feature (480)..(481): n is a, c, g, or t
  misc_feature (483)..(483): n is a, c, g, or t
  misc_feature (493)..(493): n is a, c, g, or t
  misc_feature (502)..(502): n is a, c, g, or t
gcgggacgcgcttggccttgcccgcgcccgctcgcctcgtctcgcccggcctccccgcgtcgcctcgtcgcctgttccgcgccaggcatggcccccagcactgtggccgtggagctgctcagccccaaagagaaaaaccgactgcggaagccggtggtggagaagatgcgccgcgaccgcatcaacagcagcatcgagcagctgaagctgctgctggagcaggagttcgcgcggcaccagcccaactccaagctggagaaggccgacatcctggagatggctgtcagctacctgaagcacagcaaagccttcgtcgccgccgccggccccaagagcctgcaccangactacagcgaaggctactcgtggtgcctgcaggaggccgtgcagttcctgacgctccacgccgccancgacacgcaaatgaagctgctgtaccacttccagtgnnctccggccgcncnngcngtgcccnncaannancccaaggcancaggcgccn

SEQ ID NO: 711 - DNA, 940 bp, Homo sapiens
  misc_feature (566)..(566): n is a, c, g, or t
  misc_feature (753)..(753): n is a, c, g, or t
  misc_feature (758)..(758): n is a, c, g, or t
  misc_feature (769)..(769): n is a, c, g, or t
  misc_feature (771)..(771): n is a, c, g, or t
  misc_feature (793)..(793): n is a, c, g, or t
  misc_feature (799)..(799): n is a, c, g, or t
  misc_feature (852)..(852): n is a, c, g, or t
  misc_feature (858)..(858): n is a, c, g, or t
  misc_feature (861)..(861): n is a, c, g, or t
  misc_feature (869)..(870): n is a, c, g, or t
  misc_feature (876)..(876): n is a, c, g, or t
  misc_feature (879)..(879): n is a, c, g, or t
  misc_feature (882)..(882): n is a, c, g, or t
  misc_feature (887)..(887): n is a, c, g, or t
  misc_feature (893)..(893): n is a, c, g, or t
  misc_feature (897)..(897): n is a, c, g, or t
  misc_feature (911)..(912): n is a, c, g, or t
  misc_feature (927)..(928): n is a, c, g, or t
  misc_feature (932)..(932): n is a, c, g, or t
  misc_feature (938)..(938): n is a, c, g, or t
  misc_feature (940)..(940): n is a, c, g, or t
gcctggagacagctccgagacggcttcacctcggagggagagatcctggagatctctgacatccagcggggccaggccggggagtatgagtgcgtgactcacaacggggttaactcggcgcccgacagccgccgcgtgctggtcacagtcaactatcctccgaccatcacggacgtgaccagcgcccgcaccgcgctgggccgggccgccctcctgcgctgcgaagccatggcggttccccccgcggatttccagtggtacaaggatgacagactgctgagcagcggcacggccgaaggcctgaaggtgcagacggagcgcacccgctcgatgcttctctttgccaacgtgagcgcccggcattacggcaactatacgtgtcgcgccgccaaccgactgggagcgtccagcgcctccatgcggctcctggccctcctctccgccctgggctggctgtggtggagaatgtaggcgcaacccagtggagctcacctccccctgcagggggcctcaggccaagagtgagagaaacgggggagcaagagccgtgggtctcgtgggggcanaagagctctcggccaccaaggaagaagagagaggagaagaggaggaggcagaggaagaaagatcttcagagaacccatcactgtgagggataacgcaaaattatgcatctttctacagccattctcgccacccgttcacgtttccgattgtgacccactcccgccaccccatacccctctctcttanctcangctgtcaaatngncttgtgtgggtgtgggtgtgtnaatgtnaacctgcatgcatgtgtaggtgtctgtgtctctgtttgtgtgtgtgtgggggngttggnctnggggaaannaattanccntcntcccncccccnaaanccccatgtcaatgnnccccaaccttattgnntttnactttngn

SEQ ID NO: 712 - DNA, 927 bp, Homo sapiens
  misc_feature (628)..(628): n is a, c, g, or t
  misc_feature (782)..(782): n is a, c, g, or t
  misc_feature (788)..(788): n is a, c, g, or t
  misc_feature (790)..(790): n is a, c, g, or t
  misc_feature (793)..(793): n is a, c, g, or t
  misc_feature (797)..(797): n is a, c, g, or t
  misc_feature (803)..(806): n is a, c, g, or t
  misc_feature (808)..(808): n is a, c, g, or t
  misc_feature (811)..(811): n is a, c, g, or t
  misc_feature (817)..(817): n is a, c, g, or t
  misc_feature (820)..(820): n is a, c, g, or t
  misc_feature (825)..(825): n is a, c, g, or t
  misc_feature (836)..(836): n is a, c, g, or t
  misc_feature (838)..(838): n is a, c, g, or t
  misc_feature (843)..(843): n is a, c, g, or t
  misc_feature (846)..(846): n is a, c, g, or t
  misc_feature (853)..(853): n is a, c, g, or t
  misc_feature (861)..(861): n is a, c, g, or t
  misc_feature (870)..(870): n is a, c, g, or t
  misc_feature (874)..(874): n is a, c, g, or t
  misc_feature (876)..(876): n is a, c, g, or t
  misc_feature (894)..(894): n is a, c, g, or t
  misc_feature (899)..(899): n is a, c, g, or t
  misc_feature (901)..(901): n is a, c, g, or t
  misc_feature (907)..(907): n is a, c, g, or t
  misc_feature (920)..(920): n is a, c, g, or t
  misc_feature (922)..(922): n is a, c, g, or t
gcaccgacttcgacggcacccgagtgtacagccccccggagtggatccgctaccaccgctaccacgggcgctcggccaccgtgtggtcgctgggcgtgcttctctacgatatggtgtgtggggacatccccttcgagcaggacgaggagatcctccgaggccgcctgctcttccggaggagggtctctccagagtgccagcagctgatccggtggtgcctgtccctgcggccctcagagcggccgtcgctggatcagattgcggcccatccctggatgctgggggctgacgggggcgccccggagagctgtgacctgcggctgtgcaccctcgaccctgatgacgtggccagcaccacgtccagcagcgagagcttgtgaggagctgcacctgactgggagctaggggaccacctgccttggccagacctgggacgcccccagaccctgactttttcctgcgtgggccgtctcctcctgcggaagcagtgacctctgacccctggtgaccttcgctttgagtgccttttgaacgctggtcccgcgggacttggttttctcaagctctgtctgtccaaagacgctccggtcgaggtcccgcctgccctgggtggatacttgaaccccanacgcccctctgtgctgctgtgtccggaggcggccttcccatctgcctgcccacccggagctctttccgccggcgcagggtcccaaagcccacctcccgccctcatcctgcggtgtgcgtctgggcacgtcctgcacacacaatgcaatcttggnctccgngnccngccngcccannnnanccntacccnccnccaantctgttatttnanggtgngancccctgnagtgcccncggcccacngggncnaatttattgtttaattantttgntnaaggtnatttcctctgaanantttgc

SEQ ID NO: 713 - DNA, 1171 bp, Homo sapiens
  misc_feature (545)..(545): n is a, c, g, or t
  misc_feature (783)..(783): n is a, c, g, or t
  misc_feature (831)..(831): n is a, c, g, or t
  misc_feature (842)..(842): n is a, c, g, or t
  misc_feature (854)..(854): n is a, c, g, or t
  misc_feature (858)..(858): n is a, c, g, or t
  misc_feature (872)..(872): n is a, c, g, or t
  misc_feature (876)..(876): n is a, c, g, or t
  misc_feature (905)..(905): n is a, c, g, or t
  misc_feature (920)..(921): n is a, c, g, or t
  misc_feature (964)..(964): n is a, c, g, or t
  misc_feature (966)..(966): n is a, c, g, or t
  misc_feature (971)..(971): n is a, c, g, or t
  misc_feature (974)..(974): n is a, c, g, or t
  misc_feature (977)..(977): n is a, c, g, or t
  misc_feature (983)..(983): n is a, c, g, or t
  misc_feature (994)..(994): n is a, c, g, or t
  misc_feature (1004)..(1004): n is a, c, g, or t
  misc_feature (1011)..(1011): n is a, c, g, or t
  misc_feature (1013)..(1013): n is a, c, g, or t
  misc_feature (1017)..(1018): n is a, c, g, or t
  misc_feature (1040)..(1040): n is a, c, g, or t
  misc_feature (1050)..(1050): n is a, c, g, or t
  misc_feature (1052)..(1053): n is a, c, g, or t
  misc_feature (1056)..(1056): n is a, c, g, or t
  misc_feature (1059)..(1059): n is a, c, g, or t
  misc_feature (1082)..(1082): n is a, c, g, or t
  misc_feature (1092)..(1092): n is a, c, g, or t
  misc_feature (1097)..(1097): n is a, c, g, or t
  misc_feature (1101)..(1101): n is a, c, g, or t
  misc_feature (1110)..(1110): n is a, c, g, or t
  misc_feature (1112)..(1112): n is a, c, g, or t
  misc_feature (1116)..(1116): n is a, c, g, or t
  misc_feature (1124)..(1124): n is a, c, g, or t
  misc_feature (1130)..(1130): n is a, c, g, or t
  misc_feature (1140)..(1140): n is a, c, g, or t
  misc_feature (1142)..(1142): n is a, c, g, or t
  misc_feature (1153)..(1153): n is a, c, g, or t
  misc_feature (1160)..(1160): n is a, c, g, or t
  misc_feature (1169)..(1169): n is a, c, g, or t
  misc_feature (1171)..(1171): n is a, c, g, or t
gagaacgacccccggaccgaccaaagcccgcgcgccgctgcatcccgcgtccagcacctacgtcccgctgccgtcgccgccgccaccatgcccaagagaaaggctgaaggggatgctaagggagataaagcaaaggtgaaggacgaaccacagagaagatccgcgaggttgtctgctaaacctgctcctccaaagccagagcccaagcctaaaaaggcccctgcaaagaagggagagaaggtacccaaagggaaaaagggaaaagctgatgctggcaaggaggggaataaccctgcagaaaatggagatgccaaaacagaccaggcacagaaagctgaaggtgctggagatgccaagtgaagtgtgtgcatttttgataactgtgtacttctggtgactgtacagtttgaaatactattttttatcaagttttataaaaatgcagaattttgttttacttttttttttttttttaaaagctatgttgttagcacacagaacacttcattgttgtttttgggggaaggggcatatgtcactaatanaatgtctccaaagctggattgatgtggagaaaacacctttcccttctagttttgagagacttcctcttggctcccaggaggagggattccctgactttgacacacatggccaccttggcacaaaagccttgtggtatagaaaaaacaaatttgtttttatgtcctcttctccctttccatctttcagcataaacttaactcccttaagcccaaacatctgttgagacctgacccctantcattggttaccagtgtgtcaggcaatctggactttccagtgatgccnctgaaatggcncctgtcaaaaancagnggttccatttctanatgnggattttcaaaaaatttctgccattttcnttcccttcctgaaanncagggtcggcttgtgaaaagtttttaaacaacatgctaaatgngnaatgncanccntccctntaaactttccntgttcaaacntcaaagnanactnnttggggttttaaagggcttttngatttttggnannccnttnaaaaagggaatttaaaatttttntttattgttnaaaantttntgcccgttncngccngaaaaccnggattnttttgggaanantttttaaaaanctggaanctttggttngn

SEQ ID NO: 714 - DNA, 726 bp, Homo sapiens
  misc_feature (427)..(427): n is a, c, g, or t
  misc_feature (486)..(486): n is a, c, g, or t
  misc_feature (512)..(512): n is a, c, g, or t
  misc_feature (542)..(542): n is a, c, g, or t
  misc_feature (555)..(556): n is a, c, g, or t
  misc_feature (569)..(569): n is a, c, g, or t
  misc_feature (588)..(589): n is a, c, g, or t
  misc_feature (604)..(604): n is a, c, g, or t
  misc_feature (608)..(608): n is a, c, g, or t
  misc_feature (615)..(615): n is a, c, g, or t
  misc_feature (617)..(617): n is a, c, g, or t
  misc_feature (626)..(626): n is a, c, g, or t
  misc_feature (630)..(630): n is a, c, g, or t
  misc_feature (640)..(640): n is a, c, g, or t
  misc_feature (649)..(649): n is a, c, g, or t
  misc_feature (656)..(656): n is a, c, g, or t
  misc_feature (659)..(659): n is a, c, g, or t
  misc_feature (662)..(662): n is a, c, g, or t
  misc_feature (668)..(669): n is a, c, g, or t
  misc_feature (677)..(677): n is a, c, g, or t
  misc_feature (690)..(690): n is a, c, g, or t
  misc_feature (693)..(693): n is a, c, g, or t
  misc_feature (697)..(697): n is a, c, g, or t
  misc_feature (706)..(706): n is a, c, g, or t
  misc_feature (709)..(709): n is a, c, g, or t
  misc_feature (713)..(713): n is a, c, g, or t
  misc_feature (719)..(719): n is a, c, g, or t
  misc_feature (721)..(721): n is a, c, g, or t
  misc_feature (726)..(726): n is a, c, g, or t
gaaaggcgcggcggggaggggagccggggccccagccctgccgggaaacgggttcccagtcccggccgagagcgcgggcgccgaggggaccgacccggactccccgcaaccccccaaccgccaggccatggcgcccacggggctcctggtggccggcgcctccttcctcgcgttccgggggctgcactgggggttgcggcggctgcccacgccggaatcggccgctcgggaccgctggcagtggtggaacctctgcgtctccctggcgcacagcctgctctcggggaccggggcgctgctcggcctgtcactgtaccctcagatggccgccgaccccatccatggccacccgcgctgggctctggtgctggtggctgtgtctgtgggttacttcctggcagacggagctgacctgctgtggaaccanaccttgggcaagacctgggatcttctctgtcatcatttggtggtggtgagctgcctcancaccgctgttctgtctggccactacntgggcttctccatggtgtctctgctcctgnaactgaactccannctgggcaacaaantgagactcttgtctctaannaaaaaaaaaaaaaangaanaactggnanttttctganatanattcataaantcttcttcntccctgntgnttntgctgnntttttttntgttgaaaaaaanccnttcnttccaaaanatntaanttaatngnaaatn

SEQ ID NO: 715 - DNA, 993 bp, Homo sapiens
  misc_feature (215)..(215): n is a, c, g, or t
  misc_feature (630)..(630): n is a, c, g, or t
  misc_feature (674)..(674): n is a, c, g, or t
  misc_feature (741)..(741): n is a, c, g, or t
  misc_feature (760)..(760): n is a, c, g, or t
  misc_feature (762)..(762): n is a, c, g, or t
  misc_feature (776)..(776): n is a, c, g, or t
  misc_feature (779)..(779): n is a, c, g, or t
  misc_feature (803)..(803): n is a, c, g, or t
  misc_feature (806)..(806): n is a, c, g, or t
  misc_feature (808)..(808): n is a, c, g, or t
  misc_feature (816)..(816): n is a, c, g, or t
  misc_feature (825)..(825): n is a, c, g, or t
  misc_feature (829)..(829): n is a, c, g, or t
  misc_feature (832)..(832): n is a, c, g, or t
  misc_feature (845)..(845): n is a, c, g, or t
  misc_feature (876)..(876): n is a, c, g, or t
  misc_feature (883)..(883): n is a, c, g, or t
  misc_feature (886)..(886): n is a, c, g, or t
  misc_feature (894)..(894): n is a, c, g, or t
  misc_feature (897)..(897): n is a, c, g, or t
  misc_feature (904)..(904): n is a, c, g, or t
  misc_feature (906)..(906): n is a, c, g, or t
  misc_feature (919)..(919): n is a, c, g, or t
  misc_feature (924)..(924): n is a, c, g, or t
  misc_feature (930)..(931): n is a, c, g, or t
  misc_feature (934)..(934): n is a, c, g, or t
  misc_feature (936)..(936): n is a, c, g, or t
  misc_feature (946)..(946): n is a, c, g, or t
  misc_feature (953)..(954): n is a, c, g, or t
  misc_feature (967)..(967): n is a, c, g, or t
  misc_feature (969)..(969): n is a, c, g, or t
  misc_feature (973)..(973): n is a, c, g, or t
  misc_feature (980)..(980): n is a, c, g, or t
  misc_feature (984)..(984): n is a, c, g, or t
  misc_feature (987)..(987): n is a, c, g, or t
  misc_feature (992)..(992): n is a, c, g, or t
ggagctcgggacgtgatcgtgggcgcgcagccagcggctccctgcccttcccctccgggccctgagtaccggccccccaccaaggaggagcccgaggtctccgtcccggcggcgatgctgccccgtcggcctctggcgtggcccgcgtggctgttgcggggtgctccgggagccgcgggttcttggggtcggccggttggccccctggcccgcanaggctgctgctccgccccggggacccccgaggtgccgctgacccgggagcgctaccccgtgcggcgcttgccgttctccacggtgtctaagcaggacctggccgcctttgagcgcatcgtgcccggcggggtcgtcacggacccggaagcgctgcaggctcccaacgtggactggttgcggacgctgcgaggctgtagcaaggtgctgctgaggccacggacgtcggaggaggtgtcccacatcctcaggcactgccacgagaggaacctggccgtgaacccacaggggggcaacacaggcatggtgggtggcagcgtccccgtctttgacgagatcatcctctccactgcccgcatgaaccgggtcctcagcttccacagcgtgtctggcgggctgcgtcctggaggagctganccggtatgtggaggaacgggacttcatcatgccgctggacttangagccaagggcagctgccacatcgggggaaacgtggcaaccaacgctggaggcctgcggtttcttcnatatggctcactgcatggnantgtcctgggcctgnaantggtgctggccgaaggcactgtcntgnantgcctganctccctgangaanganaacacgggctatnactgaaacaactgttcatcgggtcgaaggantttgggnatnatcaccanggngtccatntngtgtccaccaaancccanggttgnnaangnggttttctcntcactgnntgcccccccctgngntctnggaaccnaagnaanccggnt

SEQ ID NO: 716 - DNA, 532 bp, Homo sapiens
gcggactgcgctgcgcggcgcgccgaggttgctgagtcgcgtgcagccccgggcgccctgcctgaggcggctgtggggccgcggggcccgtccagaggtcgcggggaggcggcgggcctgggcctggggctggcggcgctcaagctccgagcaggggccggggcccgcggcggctctggggcgcgtggaggcggcgcactaccagctcgtctacacctgcaaggtctgcgggactaggtcctccaagcgcatctccaagctggcctatcaccaaggcgtggtcattgtgacctgccccggctgccagaaccaccatatcatcgctgacaacctgggctggttctcggacctgaatgggaagagaaatatcgaagagatcctgacggccagaggcgagcaggtgcaccgtgtggcgggcgagggggccctggaactggttctggaggctgcaggggcccccacatccactgcagctccggaagcgggtgaggatgagggtccccccagccctggcaagacggagccgagctga
